(19) United States
(12) Patent Application Publication
(10) Pub. No.: US 2021/0180059 A1
(43) Pub. Date: Jun. 17, 2021

(54) COMPOSITIONS AND METHODS FOR IMPROVING THE EFFICACY OF CAS9-BASED KNOCK-IN STRATEGIES

(71) Applicant: ASTRAZENECA AB, SODERTALJE (SE)

(72) Inventors: MARCELLO MARESCA, SODERTALJE (SE); AMIR TAHERI-GHAHFAROKHI, SODERTALJE (SE); FREDERIK KARLSSON, SODERTALJE (SE); MOHAMMAD BOHLOOLY-YEGANEH, SODERTALJE (SE); LORENZ MARTIN MAYR, CAMBRIDGE (GB)

(21) Appl. No.: 16/763,809

(22) PCT Filed: Nov. 16, 2018
(86) PCT No.: PCT/US2018/061680

§ 371 Date: May 13, 2020

Related U.S. Application Data
(60) Provisional application No. 62/693,690, filed on Jul. 3, 2018.
(60) Provisional application No. 62/587,029, filed on Nov. 16, 2017.

(51) Int. Cl. C12N 15/113; C12N 15/10; C12N 9/22

(52) U.S. Cl. CPC C12N 15/113; C12N 15/102; C12N 9/22; C12N 2810/40; C12N 2800/24; C12N 2800/22; C12N 2310/20

(57) ABSTRACT

The present disclosure provides a non-naturally occurring CRISPR-Cas system comprising: a Cas9 effector protein capable of generating cohesive ends (stiCas9), and a guide polynucleotide that forms a complex with the stiCas9 and comprising a guide sequence, wherein the guide sequence hybridizes with a target sequence in a eukaryotic cell but does not hybridize to a sequence in a bacterial cell, and wherein the complex does not occur in nature. The present disclosure also provides a method of introducing a sequence of interest into a chromosome of a cell. Finally, the present disclosure provides for a method of modifying one or more nucleotides using seamless mutagenesis.

### SEQUENCE LISTING

[0001] The instant application contains a Sequence Listing which has been submitted electronically in ASCII format and is hereby incorporated by reference in its entirety. Said ASCII copy, created on Nov. 16, 2018, is named 0098-0002WO1_SL.txt and is 1,105,014 bytes in size.

### FIELD OF THE INVENTION

[0002] The present disclosure provides a non-naturally occurring CRISPR-Cas system comprising: a Cas9 effector protein capable of generating cohesive ends (stiCas9), and a guide polynucleotide that forms a complex with the stiCas9 and comprising a guide sequence, wherein the guide sequence hybridizes with a target sequence in a eukaryotic cell but does not hybridize to a sequence in a bacterial cell, and wherein the complex does not occur in nature.

### BACKGROUND

[0003] Clustered Regularly Interspaced Short Palindromic Repeats (CRISPR) and CRISPR-associated (Cas) systems are prokaryotic immune systems first discovered by Ishino in E. coli (Ishino et al., Journal of Bacteriology 169(12): 5429-5433 (1987), incorporated by reference herein in its entirety). This immune system provides immunity against viruses and plasmids by targeting the nucleic acids of the viruses and plasmids in a sequence-specific manner. See also Soret et al., “CRISPR—a widespread system that provides acquired resistance against phages in bacteria and archaea”, Nature Reviews Microbiology 6(3): 181-186 (2008), incorporated by reference herein in its entirety. CRISPR-Cas systems have been classified into three main types: Type I, Type II, and Type III. The main defining features of the separate Types are the various cas genes, and the respective proteins they encode, that are employed. The cas1 and cas2 genes appear to be universal across the three main Types, whereas cas3, cas9, and cas10 are thought to be specific to the Type I, Type II, and Type III systems, respectively. See, e.g., Barrangou and Marraffini, “CRISPR-Cas systems: prokaryotes upgrade to adaptive immunity”, Cell 54(2): 234-244 (2014), incorporated by reference herein in its entirety.

[0004] There are two main stages involved in this immune system: the first is acquisition, and the second is interference. The first stage involves cutting the genome of invading viruses and plasmids and integrating segments of this into the CRISPR locus of the organism. The segments that are integrated into the genome are known as protospacers and help in protecting the organism from subsequent attack by the same virus or plasmid. The second stage involves attacking an invading virus or plasmid. This stage relies upon the protospacers being transcribed to RNA, this RNA, following some processing, then hybridizes with a complementary sequence in the DNA of an invading virus or plasmid while also associating with a protein, or protein complex that effectively cleaves the DNA.

[0005] Depending on the bacterial species, CRISPR RNA processing proceeds differently. For example, in the Type II system, originally described in the bacterium Streptococcus pyogenes, the transcribed RNA is paired with a trans-activating RNA (tracrRNA) before being cleaved by RNase III to form an individual CRISPR-RNA (crRNA). The crRNA is further processed after binding by the Cas9 nuclease to produce the mature crRNA. The crRNA/Cas9 complex subsequently binds to DNA containing sequences complementary to the captured regions (termed protospacers). The Cas9 protein then cleaves both strands of DNA in a site-specific manner, forming a double-strand break (DSB). This provides a DNA-based “memory”, resulting in rapid degradation of viral or plasmid DNA upon repeat exposure and/or infection. The native CRISPR system has been comprehensively reviewed (see, e.g., Barrangou and Marraffini, 2014).

[0006] Since its original discovery, multiple groups have done extensive research around potential applications of the CRISPR system in genetic engineering, including gene editing (Jinek et al., “A programmable dual-RNA-guided DNA endonuclease in adaptive bacterial immunity”, Science 337(6096): 816-821 (2012); Cong et al., “Multiplex genome engineering using CRISPR/Cas systems”, Science 339(6121): 819-823 (2013); and Mali et al., “RNA-guided human genome engineering via Cas9”, Science 339(6121): 823-826 (2013); each of which is incorporated by reference herein in its entirety). One major development was utilization of a chimeric RNA to target the Cas9 protein, designed around individual units from the CRISPR array fused to the tracrRNA. This creates a single RNA species, called a small guide RNA (gRNA) where modification of the sequence in the protospacer region can target the Cas9 protein site-specifically. Considerable work has been done to understand the nature of the base-pairing interaction between the chimeric RNA and the target site, and its tolerance to mismatches, which is highly relevant in order to predict and assess off-target effects (see, e.g., Fu et al., “Improving CRISPR-Cas nucleases using truncated guide RNAs”, Nature Biotechnology 32(3): 279-284 (2014), including supporting materials, which is incorporated by reference herein in its entirety).

[0007] The CRISPR-Cas9 gene editing system has been used successfully in a wide range of organisms and cell lines, both in order to induce DSB formation using the wild type Cas9 protein or to nick a single DNA strand using a mutant protein termed Cas9n/Cas9 D10A (see, e.g., Mali et al., 2013 and Sander and Joung, “CRISPR-Cas systems for editing, regulating and targeting genomes”, Nature Biotechnology 32(4): 347-355 (2014), each of which is incorporated by reference herein in its entirety). While DSB formation results in creation of small insertions and deletions (indels) that can disrupt gene function, the Cas9n/Cas9 D10A nickase avoids indel creation (the result of repair through non-homologous end-joining) while stimulating the endogenous homologous recombination machinery. Thus, the Cas9n/Cas9 D10A nickase can be used to insert regions of DNA into the genome with high-fidelity.

[0008] In addition to genome editing, the CRISPR system has a multitude of other applications, including regulating gene expression, genetic circuit construction, and functional genomics, amongst others (reviewed in Sander and Joung, 2014).

[0009] Various publications are cited herein, the disclosures of which are incorporated by reference herein in their entireties.

### SUMMARY OF THE INVENTION

[0010] In some embodiments, the present disclosure provides a non-naturally occurring CRISPR-Cas system comprising: a Cas9 effector protein capable of generating cohesive ends (stiCas9), and a guide polynucleotide that forms a complex with the stiCas9 and comprises a guide sequence, wherein the guide sequence hybridizes with a target sequence in a eukaryotic cell but does not hybridize to a sequence in a bacterial cell, wherein the complex does not occur in nature.

[0011] In some embodiments, the present disclosure provides a non-naturally occurring CRISPR-Cas system comprising: a Cas9 effector protein capable of generating cohesive ends (stiCas9) and comprises a nuclear localization sequence (NLS), and a guide polynucleotide that forms a complex with the stiCas9 and comprises a guide sequence, wherein the complex does not occur in nature.

[0012] In some embodiments, the present disclosure provides a non-naturally occurring CRISPR-Cas system comprising: one or more nucleotide sequences encoding a Cas9 effector protein capable of generating cohesive ends (stiCas9), and a nucleotide sequence encoding a guide polynucleotide that forms a complex with the stiCas9 and comprises a guide sequence, wherein the guide sequence hybridizes with a target sequence in a eukaryotic cell but does not hybridize to a sequence in a bacterial cell, and wherein the complex does not occur in nature.

[0013] In some embodiments, the present disclosure provides a non-naturally occurring CRISPR-Cas system comprising: (a) one or more nucleotide sequences encoding a Cas9 effector protein capable of generating cohesive ends (stiCas9), and (b) a nucleotide sequence encoding a guide polynucleotide that forms a complex with the stiCas9 and comprises a guide sequence, wherein the nucleotide sequences of (a) and (b) are under control of a eukaryotic promoter, and wherein the complex does not occur in nature.

[0014] In some embodiments, the CRISPR-Cas systems of the present disclosure further comprise a polynucleotide comprising a tracrRNA sequence. In some embodiments, the guide polynucleotide, tracrRNA sequence and the stiCas9 of the CRISPR-Cas systems are capable of forming a complex, and the complex does not occur in nature.

[0015] In some embodiments, the present disclosure provides a non-naturally occurring CRISPR-Cas system comprising one or more vectors comprising: a regulatory element operably linked to one or more nucleotide sequences encoding a Cas9 effector protein capable of generating cohesive ends (stiCas9), and a guide polynucleotide that forms a complex with the stiCas9 and comprises a guide sequence, wherein the guide sequence hybridizes with a target sequence in a eukaryotic cell but does not hybridize to a sequence in a bacterial cell, wherein the complex does not occur in nature.

[0016] In some embodiments, the present disclosure provides a non-naturally occurring CRISPR-Cas system comprising one or more vectors comprising: a regulatory element operably linked to one or more nucleotide sequences encoding a Cas9 effector protein capable of generating cohesive ends (stiCas9), wherein the regulatory element is a eukaryotic regulatory element, and a guide polynucleotide that forms a complex with the stiCas9 and comprises a guide sequence, wherein the complex does not occur in nature.

[0017] In some embodiments, the guide polynucleotide further comprises a tracrRNA sequence. In some embodiments, the non-naturally occurring vector of the present disclosure further comprises a nucleotide sequence comprising a tracrRNA sequence.

[0018] In some embodiments of the CRISPR-Cas system, the complex is capable of cleaving at a site within 10 nucleotides of a Protospacer Adjacent Motif (PAM). In some embodiments of the CRISPR-Cas system, the complex is capable of cleavage at a site within 5 nucleotides of a Protospacer Adjacent Motif (PAM). In some embodiments of the CRISPR-Cas system, the complex is capable of cleavage at a site within 3 nucleotides of a Protospacer Adjacent Motif (PAM).

[0019] In some embodiments of the CRISPR-Cas system, the target sequence is 5′ of a Protospacer Adjacent Motif (PAM) and the PAM comprises a 3′ G-rich motif. In embodiments of the CRISPR-Cas system, the target sequence is 5′ of a Protospacer Adjacent Motif (PAM) and the PAM sequence is NGG, wherein N is A, C, G, or T.

[0020] In some embodiments of the CRISPR-Cas system, the cohesive ends comprise a single-stranded polynucleotide overhang of 3 to 40 nucleotides. In some embodiments of the CRISPR-Cas system, the cohesive ends comprise a single-stranded polynucleotide overhang of 4 to 20 nucleotides. In some embodiments of the CRISPR-Cas system, the cohesive ends comprise a single-stranded polynucleotide overhang of 5 to 10 nucleotides.

[0021] In some embodiments of the CRISPR-Cas system, the stiCas9 is derived from a bacterial species having a Type II-B CRISPR system. In some embodiments of the CRISPR-Cas system, the stiCas9 comprises a domain having at least 80% identity, 85% identity, 90% identity or 95% identity to any of SEQ ID NOs: 10-97 or 192-195. In some embodiments, the stiCas9 comprises a domain that matches a TIGR03031 protein family with an E-value cut-off of 1E-5. In some embodiments, the stiCas9 comprises a domain that matches a TIGR03031 protein family with an E-value cut-off of 1E-10.

[0022] In some embodiments of the CRISPR-Cas system, the bacterial species from which the stiCas9 is derived is Legionella pneumophila, Francisella novicida, gamma proteobacterium HTCC5015, Parasutterella excrementihominis, Sutterella wadsworthensis, Sulfurospirillum sp. SCADC, Ruminobacter sp. RM87, Burkholderiales bacterium 1_1_47, Bacteroidetes oral taxon 274 str. F0058, Wolinella succinogenes, Burkholderiales bacterium YL45, Ruminobacter amylophilus, Campylobacter sp. P0111, Campylobacter sp. RM9261, Campylobacter lanienae strain RM8001, Camplylobacter lanienae strain P0121, Turicimonas muris, Legionella londiniensis, Salinivibrio sharmensis, Leptospira sp. isolate FW.030, Moritella sp. isolate NORP46, Endozoicomonassp . S-B4-1U, Tamilnaduibacter salinus, Vibrio natriegens, Arcobacter skirrowii, Francisella philomiragia, Francisella hispaniensis, or Parendozoicomonas haliclonae.

[0023] In some embodiments of the CRISPR-Cas system, the target sequence is 5′ of a Protospacer Adjacent Motif (PAM) and the PAM sequence is YG, wherein Y is a pyrimidine, and the stiCas9 is derived from the bacterial species F. novicida.

[0024] In some embodiments of the CRISPR-Cas system, the stiCas9 comprises one or more nuclear localization signals. In some embodiments of the CRISPR-Cas system, the eukaryotic cell is an animal or human cell. In some embodiments of the CRISPR-Cas system, the eukaryotic cell is a human cell. In some embodiments of the CRISPR-Cas system, the eukaryotic cell is a plant cell.

[0025] In some embodiments of the CRISPR-Cas system, the guide sequence is linked to a direct repeat sequence.

[0026] In some embodiments, a delivery particle comprises the CRISPR-Cas system of the present disclosure. In some embodiments, the stiCas9 and the guide polynucleotide are in a complex within the delivery particle.

[0027] In some embodiments, the guide polynucleotide further comprises a tracrRNA sequence. In some embodiments, the complex within the delivery particle further comprises a polynucleotide comprising a tracrRNA sequence.

[0028] In some embodiments, the delivery particle further comprises a lipid, a sugar, a metal, or a protein.

[0029] In some embodiments, a vesicle comprises the CRISPR-Cas system of the present disclosure.

[0030] In some embodiments, the stiCas9 and the guide polynucleotide are in a complex within the vesicle.

[0031] In some embodiments, the complex within the vesicle further comprises a polynucleotide comprising a tracrRNA sequence. In some embodiments, the vesicle is an exosome or a liposome.

[0032] In some embodiments of the CRISPR-Cas system, the one or more nucleotide sequences encoding the stiCas9 is codon optimized for expression in a eukaryotic cell.

[0033] In some embodiments of the CRISPR-Cas system, the nucleotide encoding a Cas9 effector protein and the guide polynucleotide are on a single vector.

[0034] In some embodiments of the CRISPR-Cas system, the nucleotide encoding a Cas9 effector protein and the guide polynucleotide are a single nucleic acid molecule.

[0035] In some embodiments, a viral vector comprises the CRISPR-Cas system of the present disclosure. In some embodiments, the viral vector is of an adenovirus, a lentivirus, or an adeno-associated virus.

[0036] In some embodiments, the present disclosure provides a eukaryote cell comprising a CRISPR-Cas system comprising: a Cas9 effector protein capable of generating cohesive ends (stiCas9), and a guide polynucleotide that forms a complex with the stiCas9 and comprises a guide sequence, wherein the guide sequence is capable of hybridizing with a target sequence in a eukaryotic cell, wherein the complex does not occur in nature.

[0037] In some embodiments, the present disclosure provides a eukaryote cell comprising a CRISPR-Cas system comprising a Cas9 effector protein capable of generating cohesive ends (stiCas9), wherein the Cas9 effector protein is derived from a bacterial species having a Type II-B CRISPR system.

[0038] In some embodiments, the present disclosure provides a method for providing site-specific modification of a target sequence in a eukaryotic cell, the method comprising: (1) introducing into the cell: (a) a Cas9 effector protein capable of generating cohesive ends (stiCas9), and (b) a guide polynucleotide that forms a complex with the stiCas9 and comprises a guide sequence, wherein the guide sequence is capable of hybridizing with the target sequence in the eukaryotic cell but does not hybridize to a sequence in a bacterial cell, wherein the complex does not occur in nature; (2) generating cohesive ends in the target sequence with the Cas9 effector protein and the guide polynucleotide; and (3) ligating (a) the cohesive ends together, or (b) a polynucleotide sequence of interest (SoI) to the cohesive ends, thereby modifying the target sequence.

[0039] In some embodiments, the present disclosure provides a method for providing site-specific modification of a target sequence in a eukaryotic cell, the method comprising: (1) introducing into the cell: (a) a nucleotide sequence encoding a Cas9 effector protein capable of generating cohesive ends (stiCas9), and (b) a guide polynucleotide that forms a complex with the stiCas9 and comprises a guide sequence, wherein the guide sequence is capable of hybridizing with the target sequence in the eukaryotic cell but does not hybridize to a sequence in a bacterial cell, wherein the complex does not occur in nature; (2) generating cohesive ends in the target sequence with the Cas9 effector protein and the guide polynucleotide; and (3) ligating: (a) the cohesive ends together, or (b) a polynucleotide sequence of interest (SoI) to the cohesive ends, thereby modifying the target sequence.

[0040] In some embodiments, the methods for providing site-specific modification of a target sequence in a eukaryotic cell further comprise introducing into the cell a polynucleotide comprising a tracrRNA sequence.

[0041] In some embodiments of the method, the guide polynucleotide, tracrRNA sequence, and the stiCas9 are capable of forming a complex, and wherein the complex does not occur in nature.

[0042] In some embodiments of the method, the complex is capable of cleaving at a site within 10 nucleotides of a Protospacer Adjacent Motif (PAM). In some embodiments of the method, the complex is capable of cleaving at a site within 5 nucleotides of a Protospacer Adjacent Motif (PAM). In some embodiments of the method, the complex is capable of cleaving at a site within 3 nucleotides of a Protospacer Adjacent Motif (PAM).

[0043] In some embodiments of the method, the target sequence is 5′ of a Protospacer Adjacent Motif (PAM) and the PAM comprises a 3′ G-rich motif. In some embodiments of the method, the target sequence is 5′ of a PAM and the PAM sequence is NGG, wherein N is A, C, G, or T.

[0044] In some embodiments of the method, the cohesive ends comprise a single-stranded polynucleotide overhang of 3 to 40 nucleotides. In some embodiments of the method, the cohesive ends comprise a single-stranded polynucleotide overhang of 4 to 20 nucleotides. In some embodiments of the method, the cohesive ends comprise a single-stranded polynucleotide overhang of 5 to 10 nucleotides.

[0045] In some embodiments of the method, the stiCas9 is derived from a bacterial species having a Type II-B CRISPR system.

[0046] In some embodiments of the method, the eukaryotic cell is an animal or human cell. In some embodiments of the method, the eukaryotic cell is a human cell. In some embodiments of the method, the eukaryotic cell is a plant cell.

[0047] In some embodiments of the method, the modification is deletion of at least part of the target sequence. In embodiments of the method, the modification is mutation of the target sequence. In some embodiments of the method, the modification is inserting a sequence of interest into the target sequence.

[0048] In some embodiments, the method further comprises introducing an exonuclease to remove overhangs generated from the stiCas9.

[0049] In some embodiments of the method, the exonuclease is Cas4, Artemis, or TREX4. In some embodiments of the method, the Cas4 is derived from a bacterial species having a Type II-B CRISPR system.

[0050] In some embodiments of the method, a polynucleotide encoding components of the complex is introduced on one or more vectors.

[0051] In some embodiments, the disclosure is directed to a method of introducing a sequence of interest (SoI) into a chromosome in a cell, wherein the chromosome comprises a target sequence (TSC) comprising region 1 and region 2, the method comprising introducing into the cell:
[0052] (a) a vector comprising a target sequence (TSV), the TSV comprising region 2 and region 1 and the SoI;
[0053] (b) a first Cas9-endonuclease dimer capable of generating cohesive ends in the TSC, wherein a first monomer of the first Cas9-endonuclease dimer cleaves at region 1 and a second monomer of the first Cas9-endonuclease dimer cleaves at region 2 of the TSC; and
[0054] (c) a second Cas9-endonuclease dimer capable of generating cohesive ends in the TSV, wherein a first monomer of the second Cas9-endonuclease dimer cleaves at region 2 and a second monomer of the second Cas9-endonuclease dimer cleaves at region 1 of the TSV;
[0055] wherein introduction of the vector of (a), the first Cas9-endonuclease dimer of (b) and the second Cas9-endonuclease dimer of (c) results in insertion of the SoI into the chromosome of the cell.

[0056] In some embodiments, the disclosure is directed to a method of introducing a sequence of interest (SoI) into a chromosome in a cell, wherein the chromosome comprises a target sequence (TSC) comprising region 1 and region 2, the method comprising introducing into the cell:
[0057] (a) a vector comprising a target sequence (TSV), the TSV comprising region 2 and region 1 and the SoI, wherein the vector comprises cohesive ends;
[0058] (b) a first Cas9-endonuclease dimer capable of generating cohesive ends in the TSC, wherein a first monomer of the first Cas9-endonuclease dimer cleaves at region 1 and a second monomer of the first Cas9-endonuclease dimer cleaves at region 2 of the TSC;
[0059] wherein introduction of the vector of (a) and the first Cas9-endonuclease dimer of (b) results in insertion of the SoI into the chromosome of the cell.

[0060] In some embodiments, the first and second Cas9-endonuclease dimers are the same. In some embodiments, the first and second Cas9-endonuclease dimers are different.

[0061] In some embodiments, the method further comprises introducing into the cell a first guide polynucleotide that forms a complex with the first monomer of the first Cas9-endonuclease dimer and comprises a first guide sequence, wherein the first guide sequence hybridizes to the TSC comprising region 1 but does not hybridize to the vector.

[0062] In some embodiments, the method further comprises introducing into the cell a first guide polynucleotide that forms a complex with the first monomer of the first Cas9-endonuclease dimer and comprises a first guide sequence, wherein the first guide sequence hybridizes to the TSC and the TSV.

[0063] In some embodiments, the method further comprises introducing into the cell a second guide polynucleotide that forms a complex with the second monomer of the first Cas9-endonuclease dimer and comprises a second guide sequence, wherein the second guide sequence hybridizes to the TSC comprising region 2 but does not hybridize to the vector.

[0064] In some embodiments, the method further comprises introducing into the cell a second guide polynucleotide that forms a complex with the second monomer of the first Cas9-endonuclease dimer and comprises a second guide sequence, wherein the second guide sequence hybridizes to the TSC and the TSV.

[0065] In some embodiments, the method further comprises introducing into the cell a third guide polynucleotide that forms a complex with the first monomer of the second Cas9-endonuclease dimer and comprises a third guide sequence, wherein the third guide sequence hybridizes to the TSV comprising region 2 but does not hybridize to the chromosome.

[0066] In some embodiments, the method further comprises introducing into the cell a third guide polynucleotide that forms a complex with the first monomer of the second Cas9-endonuclease dimer and comprises a third guide sequence, wherein the third guide sequence hybridizes to the TSC and the TSV.

[0067] In some embodiments, the method further comprises introducing into the cell a fourth guide polynucleotide that forms a complex with the second monomer of the second Cas9-endonuclease dimer and comprises a fourth guide sequence, wherein the fourth guide sequence hybridizes to the TSV comprising region 1 but does not hybridize to the chromosome.

[0068] In some embodiments, the method further comprises introducing into the cell a fourth guide polynucleotide that forms a complex with the second monomer of the second Cas9-endonuclease dimer and comprises a fourth guide sequence, wherein the fourth guide sequence hybridizes to the TSC and the TSV.

[0069] In some embodiments, the method comprises introducing into the cell the first, second, third, and fourth guide polynucleotides.

[0070] In some embodiments, the method further comprises introducing into the cell a polynucleotide comprising a tracrRNA sequence.

[0071] In some embodiments, the endonucleases in the first monomer and the second monomer of the first Cas9-endonuclease dimer are Type IIS endonucleases. In some embodiments, the endonucleases in the first monomer and the second monomer of the second Cas9-endonuclease dimer are Type IIS endonucleases.

[0072] In some embodiments, the endonucleases in the first Cas9-endonuclease dimer and the second Cas9-endonuclease dimer are Type IIS endonucleases. In some embodiments, the endonucleases in the first Cas9-endonuclease dimer and the second Cas9-endonuclease dimer, are independently selected from the group consisting of BbvI, BgcI, BfuAI, BmpI, BspMI, CspCI, FokI, MboII, MmeI, NmeAIII, and PleI. In some embodiments, the endonucleases in the first Cas9-endonuclease dimer and the second Cas9-endonuclease dimer are FokI. In some embodiments, the first and second Cas9-endonuclease dimers are introduced into the cell as a polynucleotide encoding the first and second Cas9-endonuclease dimer.

[0073] In some embodiments, the polynucleotides encoding the first and second Cas9-endonuclease dimers are on one vector. In some embodiments, the polynucleotides encoding the first and second Cas9-endonuclease dimers are on more than one vector.

[0074] In some embodiments, the first, second or both Cas9-endonuclease dimers comprise a modified Cas9. In some embodiments, the first, second or both Cas9-endonuclease dimers comprise a catalytically inactive Cas9. In some embodiments, the endonuclease in the first, second or both Cas9-endonuclease dimers is FokI. In some embodiments, the first, second or both Cas9-endonuclease dimers comprise a Cas9 having nickase activity. In some embodiments, the endonuclease in the first, second or both Cas9-endonuclease dimers is FokI.

[0075] In some embodiments, the Cas9-endonuclease dimer comprises a single amino-acid substitution in Cas9 relative to a wild-type Cas9. In some embodiments, the endonuclease in the first, second or both Cas9-endonuclease dimers is FokI. In some embodiments, the single amino-acid substitution is D10A or H840A. In some embodiments, the single amino-acid substitution is D10A. In some embodiments, the single amino-acid substitution is H840A. In some embodiments, the Cas9-endonuclease dimer comprises a double amino-acid substitution relative to a wild-type Cas9. In some embodiments, the double amino-acid substitution is D10A and H840A.

[0076] In some embodiments, the wild-type Cas9 is derived from Streptococcus pyogenes, Staphylococcus aureus, Staphylococcus pseudintermedius, Planococcus antarcticus, Streptococcus sanguinis, Streptococcus thermophilus, Streptococcus mutans, Coribacterium glomerans, Lactobacillus farciminis, Catenibacterium mitsuokai, Lactobacillus rhamnosus, Bifidobacterium bifidum, Oenococcus kitahara, Fructobacillus fructosus, Finegoldia magna, Veillonella atyipca, Solobacterium moorei, Acidaminococcus sp. D21, Eubacterium yurri, Coprococcus catus, Fusobacterium nucleatum, Filifactor alocis, Peptoniphilus duerdenii, or Treponema denticola.

[0077] In some embodiments, the cohesive ends comprise a 5′ overhang. In some embodiments, the cohesive ends comprise a 3′ overhang. In some embodiments, the first, second or both Cas9-endonuclease dimers generate cohesive ends comprising a single-stranded polynucleotide of 3 to 40 nucleotides. In some embodiments, the first, second or both Cas9-endonuclease dimers generate cohesive ends comprising a single-stranded polynucleotide of 4 to 20 nucleotides. In some embodiments, the first, second or both Cas9-endonuclease dimers generate cohesive ends comprising a single-stranded polynucleotide of 5 to 15 nucleotides.

[0078] In some embodiments of the method, upon the insertion, the target sequence in the chromosome and the target sequence in the plasmid are not reconstituted.

[0079] In some embodiments, the cell is a eukaryotic cell. In some embodiments, the cell is an animal or human cell. In some embodiments, the cell is a plant cell.

[0080] In some embodiments of the method of introducing a sequence of interest (SoI) into a chromosome in a cell, the vector of (a), the first Cas9-endonuclease dimer of (b), the second Cas9-endonuclease dimer of (c) or combinations thereof are introduced into the cell via delivery particles, vesicles, or viral vectors. In some embodiments, the vector of (a), the first Cas9-endonuclease dimer of (b), the second Cas9-endonuclease dimer of (c) or combinations thereof are introduced into the cell via delivery particles. In some embodiments, the delivery particles comprise a lipid, a sugar, a metal, or a protein.

[0081] In some embodiments of the method of introducing a sequence of interest (SoI) into a chromosome in a cell, the vector of (a), the first Cas9-endonuclease dimer of (b), the second Cas9-endonuclease dimer of (c) or combinations thereof are introduced into the cell via vesicles. In some embodiments, the vesicles are exosomes or liposomes.

[0082] In some embodiments of the method of introducing a sequence of interest (SoI) into a chromosome in a cell, polynucleotides capable or expressing the vector of (a), the first Cas9-endonuclease dimer of (b), the second Cas9-endonuclease dimer of (c) or combinations thereof are introduced into the cell via a viral vector. In some embodiments, the vector of (a) is a viral vector. In some embodiments, the viral vector is an adenovirus, lentivirus, or adeno-associated virus.

[0083] In some embodiments, the first monomer of the first Cas9-endonuclease dimer forms a complex with the first guide polynucleotide, and the second monomer of the first Cas9-endonuclease dimer forms a complex with the second guide polynucleotide. In some embodiments, the first monomer of the second Cas9-endonuclease dimer forms a complex with the third guide polynucleotide, and the second monomer of the second Cas9-endonuclease dimer forms a complex with the fourth guide polynucleotide. In some embodiments, the first monomer of the first Cas9-endonuclease dimer forms a complex with the first guide polynucleotide sequence and a tracrRNA sequence, and the second monomer of the first Cas9-endonuclease dimer forms a complex with the second guide polynucleotide sequence and a tracrRNA sequence. In some embodiments, the first monomer of the second Cas9-endonuclease dimer forms a complex with the third guide polynucleotide sequence and a tracrRNA sequence, and the second monomer of the second Cas9-endonuclease dimer forms a complex with the fourth guide polynucleotide sequence and a tracrRNA sequence. In some embodiments, the first, second or both Cas9-endonuclease dimers comprise a nuclear localization signal.

[0084] In some embodiments of the method of introducing a sequence of interest (SoI) into a chromosome in a cell, the cell comprises a stem cell or stem cell line.

[0085] In some embodiments, the disclosure is directed to a method of modifying one or more nucleotides in a target polynucleotide sequence in a cell, the method comprising:
[0086] (a) introducing into the cell a vector comprising an insertion cassette (IC), the IC comprising, in a 5′ to 3′ direction,
   [0087] (i) a first region homologous to part of the target polynucleotide sequence,
   [0088] (ii) a second region comprising a mutation of the target polynucleotide sequence of one or more nucleotides,
   [0089] (iii) a first nuclease binding site,
   [0090] (iv) a polynucleotide sequence encoding a marker gene,
   [0091] (v) a second nuclease binding site,
   [0092] (vi) a third region comprising a mutation of the target polynucleotide sequence of one or more nucleotides, and
   [0093] (vii) a fourth region homologous to part of the target polynucleotide sequence, wherein the first region and the fourth region are 95%-100% identical to the target polynucleotide sequence;
[0094] (b) inserting the IC into the target polynucleotide sequence via homologous recombination to generate a first modified target polynucleotide;
[0095] (c) selecting a cell which expresses the marker gene;
[0096] (d) subjecting the first modified target polynucleotide to a site-specific nuclease to generate a second modified target polynucleotide having cohesive ends; and
[0097] (e) subjecting the second modified target polynucleotide having cohesive ends to a ligase, wherein the ligase ligates the cohesive ends at the second region and the third region to create a ligated modified target nucleic acid comprising one or more modified nucleotides when compared to the target polynucleotide sequence.

[0098] In some embodiments of a method of modifying one or more nucleotides in a target polynucleotide sequence in a cell, the first modified target nucleic acid is isolated from the cell after (c).

[0099] In some embodiments, the site-specific nuclease is exogenous to the cell. In some embodiments, the ligase is exogenous to the cell. In some embodiments, the first modified target protein is in the cell after (c). In some embodiments, the site-specific nuclease is introduced into the cell as a polynucleotide encoding the site-specific nuclease. In some embodiments, the ligase is introduced into the cell as a polynucleotide encoding a ligase.

[0100] In some embodiments, the site-specific nuclease is a recombinant site-specific nuclease. In some embodiments, the ligase is a recombinant ligase. In some embodiments, the site-specific nuclease is a Cas9 effector protein. In some embodiments, the Cas9 effector protein is a Type II-B Cas9. In some embodiments, the site-specific nuclease is a Cas9-endonuclease fusion protein. In some embodiments, the endonuclease in the Cas9-endonuclease fusion protein is a Type IIS endonuclease. In some embodiments, the endonuclease in the Cas9-endonuclease fusion protein is FokI.

[0101] In some embodiments, the Cas9-endonuclease fusion protein comprises a modified Cas9. In some embodiments, the modified Cas9 comprises a catalytically inactive Cas9. In some embodiments, the catalytically inactive Cas9 is fused to FokI endonuclease.

[0102] In some embodiments, the Cas9-endonuclease fusion protein comprises a Cas9 having nickase activity, and the endonuclease is FokI. In some embodiments, the Cas9-endonuclease fusion protein comprises a Cas9 having a D10A substitution. In some embodiments, the Cas9-endonuclease fusion protein comprises a Cas9 having a H840A substitution.

[0103] In some embodiments, the site-specific nuclease is a Cpf1 effector protein. In some embodiments, the site-specific nuclease is Cas9, Cpf1, or Cas9-FokI.

[0104] In some embodiments of a method of modifying one or more nucleotides in a target polynucleotide sequence in a cell, the cohesive ends of the second modified target polynucleotide of (d) comprise a 5′ overhang. In some embodiments, the cohesive ends of the second modified target polynucleotide of (d) comprise a 3′ overhang. In some embodiments, the site-specific nuclease is capable of generating cohesive ends comprising a single-stranded polynucleotide of 3 to 40 nucleotides. In some embodiments, the nuclease is capable of generating cohesive ends comprising a single-stranded polynucleotide of 4 to 20 nucleotides. In some embodiments, the nuclease is capable of generating cohesive ends comprising a single-stranded polynucleotide of 5 to 15 nucleotides.

[0105] In some embodiments of a method of modifying one or more nucleotides in a target polynucleotide sequence in a cell, the target polynucleotide sequence is in a plasmid. In some embodiments, the target polynucleotide sequence is in a chromosome.

[0106] In some embodiments, the disclosure is directed to an engineered guide RNA that forms a complex with a stiCas9 protein, comprising: (a) a guide sequence capable of hybridizing to a target sequence in a eukaryotic cell; and (b) a tracrRNA sequence capable of binding to the Cas9 protein, wherein the tracrRNA differs from a naturally-occurring tracrRNA sequence by at least 10 nucleotides, wherein the engineered guide RNA improves nuclease efficiency of the Cas9 protein. In some embodiments, the tracrRNA sequence has at least 10 fewer nucleotides than a naturally-occurring tracrRNA. In some embodiments, the tracrRNA sequence has at least 10 more nucleotides than a naturally-occurring tracrRNA. In some embodiments, the guide sequence comprises at least 90% sequence identity to any one of SEQ ID NOs: 104-125 or 196-199. In some embodiments, the tracrRNA sequence comprises at least 90% sequence identity to any one of SEQ ID NOs: 148-171. In some embodiments, the guide RNA comprises at least 90% sequence identity to any one of SEQ ID NOs: 172-191.

[0107] In some embodiments, the disclosure is directed to a CRISPR-Cas system comprising an engineered guide RNA as described herein. In some embodiments, the system does not comprise a tracrRNA sequence.

[0108] In some embodiments, the disclosure is directed to an engineered Cas9-guide RNA complex, comprising any combination of Cas9, guide sequence, and tracrRNA sequence as found in FIG. 40B. In some embodiments, the disclosure is directed to a method of producing an engineered guide RNA that binds to a Cas9 protein, comprising: (a) providing a guide sequence capable of hybridizing to a target sequence in a eukaryotic cell; (b) modifying a naturally-occurring tracrRNA sequence by removing at least ten nucleotides from the tracrRNA sequence to form a modified tracrRNA sequence; and (c) linking the guide sequence to the modified tracrRNA sequence to generate the engineered guide RNA. In some embodiments, the disclosure is directed to a non-naturally occurring CRISPR-Cas system comprising: (a) a Cas9 effector protein capable of generating cohesive ends (stiCas9); and (b) a guide RNA that forms a complex with the stiCas9 and comprises a guide sequence, wherein the guide sequence is capable of hybridizing with a target sequence in a eukaryotic cell but does not hybridize to a sequence in a bacterial cell; wherein the complex does not occur in nature, and wherein the system does not comprise a tracrRNA sequence.

### BRIEF DESCRIPTION OF THE FIGURES

[0109] FIG. 1 is a schematic of different mechanisms of repair by Cas9. FIG. 1a represents gene knock-outs. FIG. 1b represents base editing. FIG. 1c represents gene knock-ins by the Non-Homologous End Joining (NHEJ) pathway. FIG. 1d represents gene knock-ins by the Homology-Directed Recombination (HDR) pathway.

[0110] FIG. 2 is a schematic of different mechanisms of gene insertion by Cas9. Homology-Directed Recombination (HDR) is shown on the left. Non-Homologous End Joining (NHEJ) is shown on the right.

[0111] FIG. 3 is a schematic and representation of results for gene insertion using different Cas9 effector proteins. FIG. 3a-b show gene insertion mediated by Cas9 generating blunt ends. FIG. 3c-d show gene insertion mediated by Cas9 generating overhangs (i.e., “sticky ends”). The lower panel of FIG. 3 is a representation of the gene insertion frequency by the different Cas9 proteins in 3a-3f, using Homology-Independent Targeted Insertion (HITI).

[0112] FIG. 4 is described by Shmakov et al., Nature Reviews Microbiology 15:169-182 (2017). FIG. 4A is a phylogeny tree of different types of CRISPR systems and representative bacterial species having each type of CRISPR system. FIG. 4B shows a close-up of the Type II and Type V CRISPR systems, with arrows indicating operons that contain a cas4 gene.

[0113] FIG. 5 is described by Chylinski et al., Nucleic Acids Research 42(10):6091-6105 (2014). FIG. 5A-D represent a phylogeny tree of Type II CRISPR systems. FIG. 5E shows the different signature genes associated with each subfamily of Type II CRISPR systems.

[0114] FIG. 6A represents the results obtained for DNA cleavage using the Cas9 protein from Francisella novicida. Mutation signatures for a genomic locus in an engineered HEK293 cell line targeted with Cas9 from Francisella novicida and Cas9 from Streptococcus pyogenes are compared. FIG. 6A discloses SEQ ID NOS 204-205 and 284, respectively, in order of appearance. FIG. 6B-C is a phylogenetic tree of Type II CRISPR systems. Cas9 proteins chosen for in vitro validation are indicated in italics.

[0115] FIG. 7 is a schematic representation of the ObLiGaRe method for gene insertion, using zinc-finger nucleases (ZFN) as described in U.S. Pat. No. 9,567,608.

[0116] FIG. 8 is a schematic representation of the Cas9-PiTCH method for gene insertion as described by Sakuma et al., Nature Protocols 11(1): 118-133 (2016).

[0117] FIG. 9 is a schematic representation of three different Cas9-FokI fusion proteins. FIG. 9a: fusion of enzymatically inactivated Cas9 (deadCas9) with FokI; FIG. 9b: fusion of Cas9 with D10A mutation (Cas9n^{D10A}) with FokI; FIG. 9c: fusion of Cas9 with H840A (Cas9n^{H840A}) with FokI. FIGS. 9a-c disclose SEQ ID NO: 206.

[0118] FIG. 10 is a schematic representation of the different DNA breaks generated by the different Cas9-FokI fusion proteins in FIGS. 9 and 10. FIG. 10 discloses SEQ ID NO: 206 as “TCCCCTCCACCCCACAGTGGGGCCACTAGGGACAGGATTGGTGACAGAAAAGCCCC ATCCTTAGGCCT” and the cleaved sequences as SEQ ID NOS 285-289, respectively, in order of appearance.

[0119] FIG. 11 is a schematic representation of the cleavage site generated by Cas9n^{D10A}-FokI.

[0120] FIG. 11 discloses SEQ ID NO: 206.

[0121] FIG. 12 is a schematic representation of a gene insertion method using Cas9n^{D10A}-FokI. gRNA: guide RNA; PAM; protospacer adjacent motif. FIG. 12 discloses the “GENOME” sequences as SEQ ID NOS 206-208, the “VECTOR” sequences as SEQ ID NOS 209-211 and the “Knockin” sequence as SEQ ID NO: 212, all respectively, in order of appearance.

[0122] FIG. 13 is a schematic representation of the cleavage site generated by Cas9n^{H840A}-FokI. FIG. 13 discloses SEQ ID NO: 206.

[0123] FIG. 14 is a schematic representation of a gene insertion method using Cas9n^{H840A}-FokI. gRNA: guide RNA; PAM; protospacer adjacent motif. FIG. 14 discloses the “GENOME” sequences as SEQ ID NOS 206 and 213-214, the “VECTOR” sequences as SEQ ID NOS 215-217 and the “Knockin” sequence as SEQ ID NO: 218, all respectively, in order of appearance.

[0124] FIGS. 15-18 relate to the experiments set forth in Example 1.

[0125] FIG. 15 is a schematic representation of a gene insertion method using Cas9n^{D10A}-FokI (FIG. 15) and Cas9n^{H840A}-FokI (FIG. 15). FIGS. 15a-b disclose SEQ ID NO: 206.

[0126] FIG. 16 represents the target site (AAVS1 locus). “PlanA” refers to the gene insertion method using Cas9n^{D10A}-FokI; “PlanB” refers to the gene insertion method using Cas9n^{H840A}-FokI. FIG. 16 discloses SEQ ID NO: 219.

[0127] FIG. 17 shows representative resulting sequences from the gene insertion method using Cas9n^{D10A}-FokI. FIG. 17 discloses SEQ ID NOS 220-235, respectively, in order of appearance.

[0128] FIG. 18 shows representative resulting sequences from the gene insertion method using Cas9n^{H840A}-FokI. FIG. 18 discloses SEQ ID NOS 236-258, respectively, in order of appearance.

[0129] FIGS. 19-22 relate to the experiments set forth in Example 2.

[0130] FIG. 19 shows the design of a set of 10 guide RNAs (gRNA) used to target the AAVS1 locus.

[0131] FIG. 20 is a plasmid map of the “donor” plasmid containing the gene to be inserted into the AAVS1 locus using the gRNAs in FIG. 20.

[0132] FIG. 21 is a schematic of the procedure for selecting cells containing a correctly inserted gene (mCherry+ cells).

[0133] FIG. 22 shows results of gene insertion frequency with spacers of different lengths.

[0134] FIGS. 23-24 relate to the experiments set forth in Example 3.

[0135] FIG. 23 is a plasmid map of the “donor” plasmid containing the gene to be inserted into the SERPINA1 locus.

[0136] FIG. 24 is a schematic representation of a gene insertion method using deadCas9-FokI. FIG. 24 discloses SEQ ID NO: 206.

[0137] FIG. 25 is a comparison of the efficiency of the different methods used for targeted gene insertions, as set forth in Examples 2-4.

[0138] FIGS. 26-29 relate to the experiments set forth in Example 4.

[0139] FIG. 26 is a schematic of a seamless mutagenesis.

[0140] FIG. 27 is a schematic of the first step of seamless mutagenesis: recombination of a cassette containing a resistance marker into a target sequence using homology arms.

[0141] FIG. 28 is a schematic of the cassette integrated into the target sequence: a resistance marker flanked on both sides by nuclease binding sites and nuclease cutting sites.

[0142] FIG. 29 is a schematic of the second step of seamless mutagenesis: nuclease digestion at the cutting sites (shown in FIG. 28) and subsequent ligation, resulting in removal of the resistance marker and a seamlessly-generated mutation.

[0143] FIG. 30 includes amino acid sequences of Cas9 proteins from various sequenced bacteria, including: Legionella pneumophila, Francisella novicida, gamma proteobacterium HTCC5015, Parasutterella excrementihominis, Sutterella wadsworthensis, Sulfurospirillum sp. SCADC, Ruminobacter sp. RM87, Burkholderiales bacterium 1-1_47, Bacteroidetes oral taxon 274 str. F0058, and Wolinella succinogenes. (SEQ ID NOS: 10-80.)

[0144] FIG. 31 includes amino acid sequences of Cas9 proteins from various sequenced bacteria, including: Burkholderiales bacterium, Campylobacter sp., Turicimonas muris, Salinivibrio sharmensis, Leptospira sp., Moritella sp., Endozoicomonas sp., Tamilnaduibacter salinus, Vibrio natriegens, Ruminobacter amylophilus, Vibrio sagaiensis, Arcobacter porcinus, Desulfofustis sp., and Succinatimonas sp. (SEQ ID NOS: 81-97.)

[0145] FIG. 32 includes nucleotide sequences of a guide RNA sequence, a tracrRNA sequence, and a crRNA sequence used in the experiments set forth in Example 8 on a Cas9 protein from MH0245_GL0161830_1 (SEQ ID NOS: 101-103).

[0146] FIG. 33A shows an exemplary 4-nucleotide 5′ overhang generated by a Type II-B Cas9 protein. FIG. 33A discloses SEQ ID NO: 259. FIG. 33B shows an exemplary Type II-B cas operon. cas9, cas 1, cas2, and cas4 genes are represented by arrows. A CRISPR array is marked downstream of the operon.

[0147] FIG. 34 relates to the experiments set forth in Example 7. FIG. 34A shows an electrophoresis gel image that demonstrates in vitro nuclease activity of a Cas9 protein from Francisella novicida (FnCas9). FIG. 34B shows a Sanger sequencing plot indicating that FnCas9 generates cohesive ends with a 5′ overhang. FIG. 34B discloses SEQ ID NOS 204-205 and 284, respectively, in order of appearance. FIG. 34C shows a RIMA comparison of the mutation patterns between Streptococcus pyogenes Cas9 protein (SpyCas9) and FnCas9.

[0148] FIGS. 35-36 relate to the experiments set forth in Example 8.

[0149] FIG. 35A shows an electrophoresis gel image that demonstrates in vitro nuclease activity of a Cas9 protein from the sequence gut metagenome MH0245 (MHCas9). FIG. 35B shows a Sanger sequencing plot indicating that MHCas9 generates cohesive ends with a 5′ overhang. FIG. 35B discloses SEQ ID NOS 260-262, respectively, in order of appearance. FIG. 35C shows an electrophoresis gel image that demonstrates MHCas9 activity in HEK293-REMINDEL cells, validated by a Cell1 assay.

[0150] FIG. 36A shows the sequence of the crRNA and tracrRNA from MHCas9. FIG. 36A discloses SEQ ID NO: 263. FIG. 36B shows a scheme of the crRNA/tracrRNA secondary structures. FIG. 36C shows a truncated phylogenetic tree with Cas9 proteins from Sulfurospirillum sp. SCADC (ssCas9), Wolinella succinogenes (WsCas9), Legionella pneumophila (LpCas9), Francisella novicida (FnCas9), and MH0245 (MHCas9).

[0151] FIG. 37 is a phylogenetic tree generated from the amino acid sequences of Cas9 proteins from various bacterial species, as described herein. Sequence alignment was performed using the MUSCLE algorithm, CLC Genomics Workbench v.9.

[0152] FIG. 38 is a phylogenetic tree generated from the amino acid sequences of Cas9 proteins from various species of the genus Campylobacter. Sequence alignment was performed using the MUSCLE algorithm, CLC Genomics Workbench v.9.

[0153] FIG. 39 includes nucleotide sequences of crRNA for various Cas9 proteins described herein (SEQ ID NOS: 104-147).

[0154] FIG. 40A includes nucleotide sequences of tracrRNA for various Cas9 proteins described herein (SEQ ID NOS: 148-171).

[0155] FIG. 40B includes various combinations of Cas9 proteins, crRNA(+), crRNA(−) and tracrRNA.

[0156] FIGS. 41A-T illustrate various sgRNAs (also termed “chimeric gRNA”) designed by the method described in Example 9, including sequences of the sgRNAs (SEQ ID NOs: 172-191). FIG. 41A also discloses the hairpin sequence as SEQ ID NO: 264.

[0157] FIGS. 42A-L illustrate the optimization and trimming of sgRNAs described in Example 9, and possible target sites for further modifications. FIG. 42A discloses SEQ ID NOS 265-266, respectively, in order of appearance. FIG. 42B discloses SEQ ID NOS 267-268, respectively, in order of appearance. FIG. 42C discloses SEQ ID NOS 269 and 173, respectively, in order of appearance. FIG. 42D discloses SEQ ID NOS 270-271, respectively, in order of appearance. FIG. 42E discloses SEQ ID NOS 178 and 272, respectively, in order of appearance. FIG. 42F discloses SEQ ID NOS 179 and 273, respectively, in order of appearance. FIG. 42G discloses SEQ ID NOS 180 and 274, respectively, in order of appearance. FIG. 42H discloses SEQ ID NOS 176 and 275, respectively, in order of appearance. FIG. 42I discloses SEQ ID NOS 174 and 276, respectively, in order of appearance. FIG. 42J discloses SEQ ID NOS 191 and 277, respectively, in order of appearance. FIG. 42K discloses SEQ ID NOS 184 and 278, respectively, in order of appearance. FIG. 42L discloses SEQ ID NOS 279-280, respectively, in order of appearance.

[0158] FIG. 43 illustrates a bi-directional expression construct of a Type II-B CRISPR-Cas system. As shown in the inset, the top strand expresses the crRNA and spacer for a single-guide RNA that does not include a tracrRNA. The bottom strand expresses the crRNA and spacer for a dual-guide RNA that includes a tracrRNA. FIG. 43 discloses SEQ ID NOS 137, 281 and 191, respectively, in order of appearance.

[0159] FIG. 44 shows predicted secondary structures of single-guide RNA scaffolds for Cas9 proteins described herein. FIG. 44 discloses SEQ ID NOS 137, 139, 282, 122, 110, 129, 120, 124 and 104, respectively, in order of appearance.

[0160] FIG. 45 generically describes four different engineered RNAs, and the cutting efficiency of each with MHCas9.

[0161] FIG. 46 demonstrates the cutting efficiency and functionality of Guide RNA of lengths 19, 20, 21, 22 and 23 with three different Cas9 systems SpyCas9, C11Cas9 and MHCas9.

[0162] FIG. 47 includes amino acid sequences of Cas9 proteins from various sequenced bacteria, including: Arcobacter skirrowii, Francisella philomiragia, Francisella hispaniensis, and Parendozoicomonas haliclonae (SEQ ID NOS: 192-195).

[0163] FIG. 48 includes nucleotide sequence of crRNA for various Cas9 proteins described herein (SEQ ID NOS: 196-203).

[0164] FIG. 49 relates to Example 11. FIG. 49A shows an exemplary method for determining the PAM sequence of a Cas9 protein. FIG. 49A discloses SEQ ID NO: 283. FIG. 49B shows the preferred PAM sequences for SpCas9 (top) and MHCas9 (bottom), as determined by the method shown in FIG. 49A.

[0165] FIGS. 50 and 51 relate Example 12.

[0166] FIG. 50A shows the schematic of a Cas9 cut repaired precisely. FIG. 50B shows the schematics of a Cas9 cut, coupled with end processing by exonucleases such as TREX2 or Artemis, resulting in imprecise repair and increased modifications.

[0167] FIG. 51A shows an overview of the method for testing the effects of adding an end processing enzyme (FnCas4 or TREX2) to various Cas9 (SpCas9, FnCas9, C11Cas9, or MHCas9), with three different guide RNAs. FIG. 51B shows the results for each of the Cas9 proteins, with either mock end processing enzyme, FnCas4, or TREX2, and with each of the three guide RNA's.

[0168] FIGS. 52 and 53 relate to Example 13.

[0169] FIGS. 52A, 52B, and 52C show the different types of mutations generated by SpCas9, C11Cas9, or MHCas9, respectively, when all three Cas9 proteins cut at the same sequence. FIGS. 52A-C disclose SEQ ID NO: 290.

[0170] FIG. 53A shows a schematic of the RuvC and HNH domains of a Type II-A Cas9 protein cutting a double-stranded DNA sequence complexed with a guide RNA, which generates blunt or single nucleotide overhangs. FIG. 53B shows a schematic of the RuvC and HNH domains of a Type II-B Cas9 protein cutting a double-stranded DNA sequence complexed with a guide RNA, which generates sticky ends with a 3- or 4-nucleotide overhang.

### DETAILED DESCRIPTION OF THE INVENTION

[0171] CRISPR-Cas9 systems are widely used in gene editing because of their ability to form targeted double-stranded breaks. Cas9 proteins are known to generate blunt ends upon cleavage, which provides less specificity compared with cohesive ends for inserting and/or modifying target sequences. Cas9 proteins capable of generating cohesive ends, also termed stiCas9, are described herein. Advantages of using stiCas9 proteins for inserting and/or modifying target sequences are described herein.

[0172] The present disclosure provides non-naturally occurring CRISPR-Cas systems; eukaryotic cells comprising CRISPR-Cas systems; methods for providing site-specific modification of a target sequence; methods of introducing a sequence of interest into a chromosome in a cell; and methods of modifying one or more nucleotides in a target polynucleotide sequence in a cell.

### Definitions

[0173] As used herein, “a” or “an” may mean one or more. As used herein in the specification and claims, when used in conjunction with the word “comprising,” the words “a” or “an” may mean one or more than one. As used herein, “another” or “a further” may mean at least a second or more.

[0174] Throughout this application, the term “about” is used to indicate that a value includes the inherent variation of error for the method/device being employed to determine the value, or the variation that exists among the study subjects. Typically, the term is meant to encompass approximately or less than 1%, 2%, 3%, 4%, 5%, 6%, 7%, 8%, 9%, 10%, 11%, 12%, 13%, 14%, 15%, 16%, 17%, 18%, 19% or 20% variability, depending on the situation.

[0175] The use of the term “or” in the claims is used to mean “and/or” unless explicitly indicated to refer only to alternatives or the alternatives are mutually exclusive, although the disclosure supports a definition that refers to only alternatives and “and/or.”

[0176] As used in this specification and claim(s), the words “comprising” (and any form of comprising, such as “comprise” and “comprises”), “having” (and any form of having, such as “have” and “has”), “including” (and any form of including, such as “includes” and “include”) or “containing” (and any form of containing, such as “contains” and “contain”) are inclusive or open-ended and do not exclude additional, unrecited, elements or method steps. It is contemplated that any embodiment discussed in this specification can be implemented with respect to any method, system, host cells, expression vectors, and/or composition of the present disclosure. Furthermore, compositions, systems, host cells, and/or vectors of the present disclosure can be used to achieve methods and proteins of the present disclosure.

[0177] The use of the term “for example” and its corresponding abbreviation “e.g.” (whether italicized or not) means that the specific terms recited are representative examples and embodiments of the disclosure that are not intended to be limited to the specific examples referenced or cited unless explicitly stated otherwise.

[0178] A “nucleic acid,” “nucleic acid molecule,” “nucleotide,” “nucleotide sequence,” “oligonucleotide,” or “polynucleotide” means a polymeric compound comprising covalently linked nucleotides. The term “nucleic acid” includes ribonucleic acid (RNA) and deoxyribonucleic acid (DNA), both of which may be single- or double-stranded. DNA includes, but is not limited to, complementary DNA (cDNA), genomic DNA, plasmid or vector DNA, and synthetic DNA. In some embodiments, the disclosure provides a polynucleotide encoding any one of the polypeptides disclosed herein, e.g., is directed to a polynucleotide encoding a Cas protein or a variant thereof.

[0179] A “gene” refers to an assembly of nucleotides that encode a polypeptide, and includes cDNA and genomic DNA nucleic acid molecules. “Gene” also refers to a nucleic acid fragment that can act as a regulatory sequence preceding (5′ non-coding sequences) and following (3′ non-coding sequences) the coding sequence.

[0180] A nucleic acid molecule is “hybridizable” or “hybridized” to another nucleic acid molecule, such as a cDNA, genomic DNA, or RNA, when a single stranded form of the nucleic acid molecule can anneal to the other nucleic acid molecule under the appropriate conditions of temperature and solution ionic strength. Hybridization and washing conditions are well known and exemplified in Sambrook et al., Molecular Cloning: A Laboratory Manual, Second Edition, Cold Spring Harbor Laboratory Press, Cold Spring Harbor (1989), particularly Chapter 11 and Table 11.1 therein (entirely incorporated herein by reference). The conditions of temperature and ionic strength determine the “stringency” of the hybridization. Stringency conditions can be adjusted to screen for moderately similar fragments, such as homologous sequences from distantly related organisms, to highly similar fragments, such as genes that duplicate functional enzymes from closely related organisms. For preliminary screening for homologous nucleic acids, low stringency hybridization conditions, corresponding to a Tₘ of 55° C., can be used, e.g., 5×SSC, 0.1% SDS, 0.25% milk, and no formamide; or 30% formamide, 5×SSC, 0.5% SDS. Moderate stringency hybridization conditions correspond to a higher Tₘ, e.g., 40% formamide, with 5× or 6×SCC. High stringency hybridization conditions correspond to the highest Tm, e.g., 50% formamide, 5× or 6×SCC. Hybridization requires that the two nucleic acids contain complementary sequences, although depending on the stringency of the hybridization, mismatches between bases are possible.

[0181] The term “complementary” is used to describe the relationship between nucleotide bases that are capable of hybridizing to one another. For example, with respect to DNA, adenosine is complementary to thymine and cytosine is complementary to guanine. Accordingly, the present disclosure also includes isolated nucleic acid fragments that are complementary to the complete sequences as disclosed or used herein as well as those substantially similar nucleic acid sequences.

[0182] A DNA “coding sequence” is a double-stranded DNA sequence that is transcribed and translated into a polypeptide in a cell in vitro or in vivo when placed under the control of appropriate regulatory sequences. “Suitable regulatory sequences” refer to nucleotide sequences located upstream (5′ non-coding sequences), within, or downstream (3′ non-coding sequences) of a coding sequence, and which influence the transcription, RNA processing or stability, or translation of the associated coding sequence. Regulatory sequences may include promoters, translation leader sequences, introns, polyadenylation recognition sequences, RNA processing site, effector binding site and stem-loop structure. The boundaries of the coding sequence are determined by a start codon at the 5′ (amino) terminus and a translation stop codon at the 3′ (carboxyl) terminus. A coding sequence can include, but is not limited to, prokaryotic sequences, cDNA from mRNA, genomic DNA sequences, and even synthetic DNA sequences. If the coding sequence is intended for expression in a eukaryotic cell, a polyadenylation signal and transcription termination sequence will usually be located 3′ to the coding sequence.

[0183] “Open reading frame” is abbreviated ORF and means a length of nucleic acid sequence, either DNA, cDNA or RNA, that comprises a translation start signal or initiation codon such as an ATG or AUG, and a termination codon and can be potentially translated into a polypeptide sequence.

[0184] The term “homologous recombination” refers to the insertion of a foreign DNA sequence into another DNA molecule, e.g., insertion of a vector in a chromosome. Preferably, the vector targets a specific chromosomal site for homologous recombination. For specific homologous recombination, the vector will contain sufficiently long regions of homology to sequences of the chromosome to allow complementary binding and incorporation of the vector into the chromosome. Longer regions of homology, and greater degrees of sequence similarity, may increase the efficiency of homologous recombination.

[0185] Methods known in the art may be used to propagate a polynucleotide according to the disclosure herein. Once a suitable host system and growth conditions are established, recombinant expression vectors can be propagated and prepared in quantity. As described herein, the expression vectors which can be used include, but are not limited to, the following vectors or their derivatives: human or animal viruses such as vaccinia virus or adenovirus; insect viruses such as baculovirus; yeast vectors; bacteriophage vectors (e.g., lambda), and plasmid and cosmid DNA vectors.

[0186] As used herein, “promoter,” “promoter sequence,” or “promoter region” refers to a DNA regulatory region/sequence capable of binding RNA polymerase and involved in initiating transcription of a downstream coding or non-coding sequence. In some examples of the present disclosure, the promoter sequence includes the transcription initiation site and extends upstream to include the minimum number of bases or elements used to initiate transcription at levels detectable above background. In some embodiments, the promoter sequence includes a transcription initiation site, as well as protein binding domains responsible for the binding of RNA polymerase. Eukaryotic promoters will often, but not always, contain “TATA” boxes and “CAT” boxes. Various promoters, including inducible promoters, may be used to drive the various vectors of the present disclosure.

[0187] A “vector” is any means for the cloning of and/or transfer of a nucleic acid into a host cell. A vector may be a replicon to which another DNA segment may be attached so as to bring about the replication of the attached segment. A “replicon” is any genetic element (e.g., plasmid, phage, cosmid, chromosome, virus) that functions as an autonomous unit of DNA replication in vivo, i.e., capable of replication under its own control. In some embodiments of the present disclosure the vector is an episomal vector, which is removed/lost from a population of cells after a number of cellular generations, e.g., by asymmetric partitioning. The term “vector” includes both viral and non-viral means for introducing the nucleic acid into a cell in vitro, ex vivo, or in vivo. A large number of vectors known in the art may be used to manipulate nucleic acids, incorporate response elements and promoters into genes, etc. Possible vectors include, for example, plasmids or modified viruses including, for example, bacteriophages such as lambda derivatives, or plasmids such as PBR322 or pUC plasmid derivatives, or the Bluescript vector. For example, the insertion of the DNA fragments corresponding to response elements and promoters into a suitable vector can be accomplished by ligating the appropriate DNA fragments into a chosen vector that has complementary cohesive termini. Alternatively, the ends of the DNA molecules may be enzymatically modified, or any site may be produced by ligating nucleotide sequences (linkers) into the DNA termini. Such vectors may be engineered to contain selectable marker genes that provide for the selection of cells that have incorporated the marker into the cellular genome. Such markers allow identification and/or selection of host cells that incorporate and express the proteins encoded by the marker.

[0188] Viral vectors, and particularly retroviral vectors, have been used in a wide variety of gene delivery applications in cells, as well as living animal subjects. Viral vectors that can be used include, but are not limited, to retrovirus, adeno-associated virus, pox, baculovirus, vaccinia, herpes simplex, Epstein-Barr, adenovirus, geminivirus, and caulimovirus vectors. Non-viral vectors include, but are not limited to, plasmids, liposomes, electrically charged lipids (cytofectins), DNA-protein complexes, and biopolymers. In addition to a nucleic acid, a vector may also comprise one or more regulatory regions, and/or selectable markers useful in selecting, measuring, and monitoring nucleic acid transfer results (transfer to which tissues, duration of expression, etc.).

[0189] Vectors may be introduced into the desired host cells by well-known methods, including, but not limited to, transfection, transduction, cell fusion, and lipofection. Vectors can comprise various regulatory elements including promoters. In some embodiments, vector designs can be based on constructs designed by Mali et al., “Cas9 as a versatile tool for engineering biology,” Nature Methods 10: 957-63 (2013). In some embodiments, the present disclosure provides an expression vector comprising any of the polynucleotides described herein, e.g., an expression vector comprising polynucleotides encoding a Cas protein or variant thereof. In some embodiments, the present disclosure provides an expression vector comprising polynucleotides encoding a Cas9 protein or variant thereof.

[0190] The term “plasmid” refers to an extra chromosomal element often carrying a gene that is not part of the central metabolism of the cell, and usually in the form of circular double-stranded DNA molecules. Such elements may be autonomously replicating sequences, genome integrating sequences, phage or nucleotide sequences, linear, circular, or supercoiled, of a single- or double-stranded DNA or RNA, derived from any source, in which a number of nucleotide sequences have been joined or recombined into a unique construction which is capable of introducing a promoter fragment and DNA sequence for a selected gene product along with appropriate 3′ untranslated sequence into a cell.

[0191] “Transfection” as used herein means the introduction of an exogenous nucleic acid molecule, including a vector, into a cell. A “transfected” cell comprises an exogenous nucleic acid molecule inside the cell and a “transformed” cell is one in which the exogenous nucleic acid molecule within the cell induces a phenotypic change in the cell. The transfected nucleic acid molecule can be integrated into the host cell's genomic DNA and/or can be maintained by the cell, temporarily or for a prolonged period of time, extra-chromosomally. Host cells or organisms that express exogenous nucleic acid molecules or fragments are referred to as “recombinant,” “transformed,” or “transgenic” organisms. In some embodiments, the present disclosure provides a host cell comprising any of the expression vectors described herein, e.g., an expression vector comprising a polynucleotide encoding a Cas protein or variant thereof. In some embodiments, the present disclosure provides a host cell comprising an expression vector comprising a polynucleotide encoding a Cas9 protein or variant thereof.

[0192] The terms “peptide,” “polypeptide,” and “protein” are used interchangeably herein, and refer to a polymeric form of amino acids of any length, which can include coded and non-coded amino acids, chemically or biochemically modified or derivatized amino acids, and polypeptides having modified peptide backbones.

[0193] An “amino acid” as used herein refers to a compound containing both a carboxyl (—COOH) and amino (—NH₂) group. “Amino acid” refers to both natural and unnatural, i.e., synthetic, amino acids. Natural amino acids, with their three-letter and single-letter abbreviations, include: Alanine (Ala; A); Arginine (Arg, R); Asparagine (Asn; N); Aspartic acid (Asp; D); Cysteine (Cys; C); Glutamine (Gln; Q); Glutamic acid (Glu; E); Glycine (Gly; G); Histidine (His; H); Isoleucine (Ile; I); Leucine (Leu; L); Lysine (Lys; K); Methionine (Met; M); Phenylalanine (Phe; F); Proline (Pro; P); Serine (Ser; S); Threonine (Thr; T); Tryptophan (Trp; W); Tyrosine (Tyr; Y); and Valine (Val; V).

[0194] An “amino acid substitution” refers to a polypeptide or protein comprising one or more substitutions of wild-type or naturally occurring amino acid with a different amino acid relative to the wild-type or naturally occurring amino acid at that amino acid residue. The substituted amino acid may be a synthetic or naturally occurring amino acid. In some embodiments, the substituted amino acid is a naturally occurring amino acid selected from the group consisting of: A, R, N, D, C, Q, E, G, H, I, L, K, M, F, P, S, T, W, Y, and V. Substitution mutants may be described using an abbreviated system. For example, a substitution mutation in which the fifth (5^{th}) amino acid residue is substituted may be abbreviated as “X5Y” wherein “X” is the wild-type or naturally occurring amino acid to be replaced, “5” is the amino acid residue position within the amino acid sequence of the protein or polypeptide, and “Y” is the substituted, or non-wild-type or non-naturally occurring, amino acid.

[0195] An “isolated” polypeptide, protein, peptide, or nucleic acid is a molecule that has been removed from its natural environment. It is also to be understood that “isolated” polypeptides, proteins, peptides, or nucleic acids may be formulated with excipients such as diluents or adjuvants and still be considered isolated.

[0196] The term “recombinant” when used in reference to a nucleic acid molecule, peptide, polypeptide, or protein means of, or resulting from, a new combination of genetic material that is not known to exist in nature. A recombinant molecule can be produced by any of the well-known techniques available in the field of recombinant technology, including, but not limited to, polymerase chain reaction (PCR), gene splicing (e.g., using restriction endonucleases), and solid-phase synthesis of nucleic acid molecules, peptides, or proteins.

[0197] The term “domain” when used in reference to a polypeptide or protein means a distinct functional and/or structural unit in a protein. Domains are sometimes responsible for a particular function or interaction, contributing to the overall role of a protein. Domains may exist in a variety of biological contexts. Similar domains may be found in proteins with different functions. Alternatively, domains with low sequence identity (i.e., less than about 50%, less than about 40%, less than about 30%, less than about 20%, less than about 10%, less than about 5%, or less than about 1% sequence identity) may have the same function. In some embodiments, a Cas9 domain matches a TIGR03031 protein family with an E-value cut-off of 1E-5. In some embodiments, a Cas9 domain matches a TIGR03031 protein family with an E-value cut-off of 1E-10. In some embodiments, a Cas9 domain is a RuvC domain. In some embodiments, a Cas9 domain is an HNH domain.

[0198] As used herein, the terms “sequence similarity” or “% similarity” refers to the degree of identity or correspondence between nucleic acid sequences or amino acid sequences. As used herein, “sequence similarity” refers to nucleic acid sequences wherein changes in one or more nucleotide bases results in substitution of one or more amino acids, but do not affect the functional properties of the protein encoded by the DNA sequence. “Sequence similarity” also refers to modifications of the nucleic acid, such as deletion or insertion of one or more nucleotide bases that do not substantially affect the functional properties of the resulting transcript. It is therefore understood that the present disclosure encompasses more than the specific exemplary sequences. Each of the proposed modifications is well within the routine skill in the art, as is determination of retention of biological activity of the encoded products.

[0199] Moreover, the skilled artisan recognizes that similar sequences encompassed by this disclosure are also defined by their ability to hybridize, under stringent conditions, with the sequences exemplified herein. Similar nucleic acid sequences of the present disclosure are those nucleic acids whose DNA sequences are at least 70%, at least 80%, at least 90%, at least 95%, or at least 99% identical to the DNA sequence of the nucleic acids disclosed herein. Similar nucleic acid sequences of the present disclosure are those nucleic acids whose DNA sequences are about 70%, at least about 70%, about 75%, at least about 75%, about 80%, at least about 80%, about 85%, at least about 85%, about 90%, at least about 90%, about 95%, at least about 95%, about 99%, at least about 99%, or about 100% identical to the DNA sequence of the nucleic acids disclosed herein.

[0200] As used herein, “sequence similarity” refers to two or more amino acid sequences wherein greater than about 40% of the amino acids are identical, or greater than about 60% of the amino acids are functionally identical. Functionally identical or functionally similar amino acids have chemically similar side chains. For example, amino acids can be grouped in the following manner according to functional similarity:
[0201] Positively-charged side chains: Arg, His, Lys;
[0202] Negatively-charged side chains: Asp, Glu;
[0203] Polar, uncharged side chains: Ser, Thr, Asn, Gln;
[0204] Hydrophobic side chains: Ala, Val, Ile, Leu, Met, Phe, Tyr, Trp;
[0205] Other: Cys, Gly, Pro.

[0206] In some embodiments, similar amino acid sequences of the present disclosure have at least 40%, at least 50%, at least 60%, at least 70%, at least 80%, at least 90%, or at least 99% identical amino acids.

[0207] In some embodiments, similar amino acid sequences of the present disclosure have at least 60%, at least 70%, at least 80%, at least 90%, or at least 95% functionally identical amino acids. In some embodiments, similar amino acid sequences of the present disclosure have about 40%, at least about 40%, about 45%, at least about 45%, about 50%, at least about 50%, about 55%, at least about 55%, about 60%, at least about 60%, about 65%, at least about 65%, about 70%, at least about 70%, about 75%, at least about 75%, about 80%, at least about 80%, about 85%, at least about 85%, about 90%, at least about 90%, about 95%, at least about 95%, about 97%, at least about 97%, about 98%, at least about 98%, about 99%, at least about 99%, or about 100% identical amino acids.

[0208] In some embodiments, similar amino acid sequences of the present disclosure have about 60%, at least about 60%, about 65%, at least about 65%, about 70%, at least about 70%, about 75%, at least about 75%, about 80%, at least about 80%, about 85%, at least about 85%, about 90%, at least about 90%, about 95%, at least about 95%, about 97%, at least about 97%, about 98%, at least about 98%, about 99%, at least about 99%, or about 100% functionally identical amino acids.

[0209] Sequence similarity is determined by sequence alignment using routine methods in the art, such as, for example, BLAST, MUSCLE, Clustal (including ClustalW and ClustalX), and T-Coffee (including variants such as, for example, M-Coffee, R-Coffee, and Expresso).

[0210] The terms “sequence identity” or “% identity” in the context of nucleic acid sequences or amino acid sequences refers to the percentage of residues in the compared sequences that are the same when the sequences are aligned over a specified comparison window. In some embodiments, only specific portions of two or more sequences are aligned to determine sequence identity. In some embodiments, only specific domains of two or more sequences are aligned to determine sequence similarity. A comparison window can be a segment of at least 10 to over 1000 residues, at least 20 to about 1000 residues, or at least 50 to 500 residues in which the sequences can be aligned and compared. Methods of alignment for determination of sequence identity are well-known and can be performed using publicly available databases such as BLAST. “Percent identity” or “% identity” when referring to amino acid sequences can be determined by methods known in the art. For example, in some embodiments, “percent identity” of two amino acid sequences is determined using the algorithm of Karlin and Altschul, Proceedings of the National Academy of Sciences USA 87: 2264-2268 (1990), modified as in Karlin and Altschul, Proceedings of the National Academy of Sciences USA 90: 5873-5877 (1993). Such an algorithm is incorporated into the BLAST programs, e.g., BLAST+ or the NBLAST and XBLAST programs described in Altschul et al., Journal of Molecular Biology, 215: 403-410 (1990). BLAST protein searches can be performed with programs such as, e.g., the XBLAST program, score=50, wordlength=3 to obtain amino acid sequences homologous to the protein molecules of the disclosure. Where gaps exist between two sequences, Gapped BLAST can be utilized as described in Altschul et al., Nucleic Acids Research 25(17): 3389-3402 (1997). When utilizing BLAST and Gapped BLAST programs, the default parameters of the respective programs (e.g., XBLAST and NBLAST) can be used.

[0211] In some embodiments, polypeptides or nucleic acid molecules have 70%, at least 70%, 75%, at least 75%, 80%, at least 80%, 85%, at least 85%, 90%, at least 90%, 95%, at least 95%, 97%, at least 97%, 98%, at least 98%, 99%, or at least 99% or 100% sequence identity with a reference polypeptide or nucleic acid molecule, respectively (or a fragment of the reference polypeptide or nucleic acid molecule). In some embodiments, polypeptides or nucleic acid molecules have about 70%, at least about 70%, about 75%, at least about 75%, about 80%, at least about 80%, about 85%, at least about 85%, about 90%, at least about 90%, about 95%, at least about 95%, about 97%, at least about 97%, about 98%, at least about 98%, about 99%, at least about 99% or about 100% sequence identity with a reference polypeptide or nucleic acid molecule, respectively (or a fragment of the reference polypeptide or nucleic acid molecule).

### CRISPR-Cas Systems

[0212] In some embodiments, the disclosure provides a non-naturally occurring CRISPR-Cas system comprising: (a) a Cas9 effector protein capable of generating cohesive ends (“sticky-end Cas9” or “stiCas9”); and (b) a guide polynucleotide that forms a complex with the stiCas9 and comprises a guide sequence, wherein the guide sequence hybridizes with a target sequence in a eukaryotic cell but does not hybridize to a sequence in a bacterial cell; wherein the complex does not occur in nature.

[0213] In general, a CRISPR or CRISPR-Cas system is characterized by elements that promote the formation of a CRISPR complex at the site of a target sequence (also referred to as a protospacer in the context of an endogenous CRISPR system). In the context of formation of a CRISPR complex, “target sequence” refers to a sequence to which a guide polynucleotide is designed to target, e.g. have complementarity, where hybridization between a target sequence and a guide polynucleotide promotes the formation of a CRISPR complex. The section of the guide polynucleotide through which complementarity to the target sequence can be important for cleavage activity is referred to herein as the guide sequence. A target sequence may comprise any polynucleotide, such as DNA or RNA polynucleotides and can be located within a target locus of interest. In some embodiments, a target sequence is located in the nucleus or cytoplasm of a cell. In some embodiments, the target sequence is located on the chromosome (TSC). In some embodiments, the target sequence is located on a vector (TSV).

[0214] As described herein, Cas proteins are components of the CRISPR-Cas system, which can be used for, inter alia, genome editing, gene regulation, genetic circuit construction, and functional genomics. While the Cas1 and Cas2 proteins appear to be universal to all the presently identified CRISPR systems, the Cas3, Cas9, and Cas10 proteins are thought to be specific to the Type I, Type II, and Type III CRISPR systems, respectively.

[0215] Following initial publications around the CRISPR-Cas9 system (Type II system), Cas9 variants have been identified in a range of bacterial species and a number have been functionally characterized. See, e.g., Chylinski et al., “Classification and evolution of type II CRISPR-Cas systems”, Nucleic Acids Research 42(10): 6091-6105 (2014), Ran et al., “In vivo genome editing using Staphylococcus aureus Cas9”, Nature 520(7546): 186-91 (2015), and Esvelt et al., “Orthogonal Cas9 proteins for RNA-guided gene regulation and editing”, Nature Methods 10(11): 1116-1121 (2013), each of which is incorporated by reference herein in its entirety.

[0216] The present disclosure encompasses novel effector proteins of Type II CRISPR-Cas systems, of which Cas9 is an exemplary effector protein. Hence, the terms “Cas9,” “Cas 9 protein” and “Cas9 effector protein” are interchangeable and are used herein to describe effector proteins which are capable of providing cohesive ends when used in the CRISPR-Cas9 system. In some embodiments, the term Cas9 refers to a Type II-B Cas9. In some embodiments, the term Cas9 refers to engineered Cas9 variants, such as, e.g., deadCas9-FokI, Cas9n^{D10A}-FokI, and Cas9n^{H840A}-FokI.

[0217] In some embodiments, the Cas9 effector protein is functional in prokaryotic or eukaryotic cells for in vitro, in vivo, or ex vivo applications.

[0218] The term Cas9 effector protein can refer to effector proteins having Cas9-like function, generally having both RuvC and HNH nuclease domains. In some embodiments, the RuvC domain and HNH domain of a Cas9 effector protein each cleave one strand of a double-stranded target DNA. Thus, for example, if the RuvC domain and the HNH domain cleaves each strand at the same position, the result of the cleavage will be a double-stranded target DNA with blunt ends. If the RuvC domain and the HNH domain cleaves each strand at different positions (i.e., cut at an “offset”), the result of the cleavage will be a double-stranded target DNA with overhangs. In embodiments, the RuvC and HNH domains of the stiCas9 protein cut at a 3-nucleotide offset. In embodiments, the RuvC and HNH domains of the stiCas9 protein cut at a 4-nucleotide offset. In embodiments, the RuvC and HNH domains of the stiCas9 protein cut at a 5-nucleotide offset. In embodiments, the RuvC and HNH domains of the stiCas9 protein cut at an offset of about 1, about 2, about 3, about 4, about 5, about 6, about 7, about 8, about 9, about 10, about 11, about 12, about 13, about 14, about 15, about 16, about 17, about 18, about 19, about 20, about 21, about 22, about 23, about 24, about 25, about 26, about 27, about 28, about 29, about 30, about 31, about 32, about 33, about 34, about 35, about 36, about 37, about 38, about 39, or about 40 nucleotides.

[0219] In some embodiments, the term Cas9 effector protein refers to a Cas9 with a RuvC domain and an HNH domain, wherein the RuvC domain and the HNH domain cleaves at different positions on each strand of the double-stranded target DNA. In some embodiments, the RuvC domain of the Cas9 effector protein cleaves one strand of the double-stranded target DNA (which can be referred to, for example, as the “non-target strand”) at from about −10, about −9, about −8, about −7, or about −6 nucleotides from the PAM, and the HNH domain of the Cas9 effector protein cleaves the other strand of the double-stranded target DNA (which can be referred to, for example, as the “target strand”) at −5, about −4, about −3, about −2, or about −1 nucleotides from the PAM.

[0220] In some embodiments, the RuvC domain cleaves one strand of the double-stranded target DNA at about −8 nucleotides from the PAM. In some embodiments, the RuvC domain cleaves one strand of the double-stranded target DNA at about −7 nucleotides from the PAM. In some embodiments, the RuvC domain cleaves one strand of the double-stranded target DNA at about −6 nucleotides from the PAM. In some embodiments, the HNH domain cleaves one strand of the double-stranded target DNA at about −4 nucleotides from the PAM. In some embodiments, the HNH domain cleaves one strand of the double-stranded target DNA at about −3 nucleotides from the PAM. In some embodiments, the HNH domain cleaves one strand of the double-stranded target DNA at about −2 nucleotides from the PAM.

[0221] In some embodiments, the term Cas9 effector protein refers to a Cas9 with the TIGR03031 protein family as identified by a HMMER search, specifically, the program hmmscan (HMMER version 3.1b2). The present disclosure also relates to the identification and engineering of effector proteins associated with Type II CRISPR-Cas systems. In some embodiments, the effector protein comprises a single-subunit effector module. In some embodiments, the wild-type Cas9 effector or an engineered version of Cas9 protein is fused to one or multiple functional domains, such as, e.g., Nuclear Localization Signals (NLS) and FokI nuclease. The present disclosure encompasses computational methods and algorithms to predict new Type II-B CRISPR-Cas systems and identify the components therein.

[0222] In some embodiments, a computational method of identifying novel Type II-B CRISPR-Cas loci comprises methods described below and previously described in Shmakov et al., Nature Reviews Microbiology 15, 169-182 (2017). The presence and location of a CRISPR-Cas locus in a given nucleotide sequence can be identified by using the protein sequence of one of the known Cas proteins as seeds, e.g. Cas1, in a TBLASTN against nucleotide sequences using, for example, an E-value cutoff of 0.01. Another approach to identify the presence and location of CRISPR-Cas locus is to search CRISPR arrays in the nucleotide sequence by use of programs such as, e.g., CRISPRfinder or PILER-CR with default parameters. Once a CRISPR-Cas locus is identified, sequences including up to 10 kbp upstream and downstream of the CRISPR-Cas locus can be extracted. The presence of genes in the extracted nucleotide sequences can be performed with software such as GeneMark or MetaGeneMark using default parameters. Identified genes are then translated into protein sequences and annotated to indicate their predicted function using homology searches such as RPS-BLAST, BLAST, or HMMR to databases of proteins with known functions (i.e., Cas1, Cas2, Cas4, Cas9, etc.).

[0223] CRISPR-Cas loci identified with the methodology above were investigated for the presence of both Cas9 and Cas4 proteins in the same CRISPR-Cas loci because these are highly likely to contain Cas9 of Type IIB. To further increase the probability of a Type-IIB Cas9, the Cas9 proteins were searched with hmmscan for belonging to the TIGRFAM: TIGR03031 family.

[0224] In some embodiments, a method of identifying novel Type II-B CRISPR-Cas loci comprises identifying Cas9 proteins in the same loci as a Cas4 protein. In some embodiments, a method of identifying novel Type II-B CRISPR-Cas loci comprises translation of publicly available metagenomic gene catalogs into amino acid sequences, scanning each amino acid sequence with the TIGR03031 protein family profile to identify matches above a pre-defined cut-off E-value such as, e.g., 1E-5 to 1E-10.

[0225] TIGRFAMs are a collection of protein families featuring curated multiple sequence alignments, Hidden Markov Models, and associated information designed to support the automated functional identification of proteins by sequence homology. Hidden Markov Models (HMMs) as applied to sequence alignments refer to a statistical model for successive columns of protein multiple sequence alignments. Typically, protein profile HMMs are developed from curated multiple sequence alignments with position-based scoring for each of the amino acid, insertion, and deletion over the length of the sequence. Scores are reported both in bits of information and as an E-value. An E-value below a “trusted cut-off” or “trusted limit” such as, e.g., 0.001, is recognized as a positive “hit” or a positive identification. Thus, sequences identified with a low E-value cut-off are likely to belong to a specified protein family. In some embodiments, the E-value cut-off is 1E-10. In some embodiments, the E-value cut-off is 1E-5. In some embodiments, the trusted cut-off E-value is at least 1E-10, at least 1E-9, at least 1E-8, at least 1E-7, at least 1E-6, at least 1E-5, at least 1E-4, at least 1E-3, at least 1E-2, or at least 1E-1.

[0226] In some embodiments, the identification of all predicted protein coding genes is carried out by comparing the identified genes with Cas protein-specific profiles and annotating them according to NCBI Conserved Domain Database (CDD), which is a protein annotation resource that consists of a collection of well-annotated multiple sequence alignment models for ancient domains and full-length proteins. These are available as position-specific score matrices (PSSMs) for fast identification of conserved domains in protein sequences via RPS-BLAST. CDD content includes NCBI-curated domains, which use 3D-structure information to explicitly define domain boundaries and provide insights into sequence/structure/function relationships, as well as domain models imported from a number of external source databases (Pfam, SMART, COG, PRK, TIGRFAM). Protein databases are described in, e.g., Finn et al., Nucleic Acids Research Database Issue 44: D279-D285 (2016); Letunic et al., Nucleic Acids Research, doi: gkx922 (2017); Tatusov et al., Science 278(5338): 631-637 (1997); and Haft et al., Nucleic Acids Research Database Issue 41: D387-D395 (2013), each of which is incorporated herein in its entirety.

[0227] In some embodiments, novel Type II-B CRISPR-Cas loci are identified using HMMER (or any version of HMMER such as HMMER2 or HMMER3) to search for conserved domains. HMMER is free and commonly used software package for sequence analysis, identification of homologous protein or nucleotide sequences, and sequence alignments. HMMER implements probabilistic models called profile hidden Markov models. HMMER can be used with a profile database such as Pfam, SMART, COG, PRK, or TIGRFAM. HMMER can also be used with query sequences, for example, searching a protein query sequence against a database (i.e., phmmer) or an iterative search (i.e., jackhmmer). In some embodiments, novel Type II-B CRISPR-Cas loci are identified by searching for the presence of a specific domain in a specific protein family. In some embodiments, the TIGRFAM protein family is TIGRFAM: TIGR03031. In some embodiments, the specific domain matches the TIGR03031 protein family with an E-value cut-off of at least 1E-0 10, at least 1E-9, at least 1E-8, at least 1E-7, at least 1E-6, at least 1E-5, at least 1E-4, at least 1E-3, at least 1E-2, or at least 1E-1. In some embodiments, the specific domain has at least 60%, at least 70%, at least 80%, at least 90%, at least 95%, at least 96%, at least 97%, at least 98%, at least 99%, or about 100% sequence similarity to any of the TIGR03031 domains identified herein. In some embodiments, the specific domain has at least 60%, at least 70%, at least 80%, at least 90%, at least 95%, at least 96%, at least 97%, at least 98%, at least 99%, or about 100% sequence similarity to any one of SEQ ID NOs: 10-97 or 192-195. In some embodiments, the specific domain has at least 40%, at least 50%, at least 60%, at least 70%, at least 80%, at least 90%, at least 95%, at least 96%, at least 97%, at least 98%, at least 99%, or about 100% sequence identity to any one of SEQ ID NOs: 10-97 or 192-195.

[0228] In some embodiments, the stiCas9 is derived from a bacterial species having a Type II-B CRISPR system. In some embodiments, the Type II-B CRISPR system includes a cas4 gene. As discussed herein, CRISPR systems have been classified as Type I, Type II, and Type III. All Type II CRISPR systems include the cas1, cas2, and cas9 genes on the cas operon. Type II CRISPR systems are further categorized into Type II-A, Type II-B, and Type II-C. In some embodiments, Type II-B CRISPR systems are identified by the presence of a cas4 gene on the cas operon. A cas4 gene is not found in Type II-A or Type II-C CRISPR systems.

[0229] Type II CRISPR systems can also be classified according to the sequence of individual cas genes, for example, the sequence and/or domains of cas9. Protein domains may be identified by conserved sequences or conserved motifs and classified into families, super families, and subfamilies. For example, protein domains can be classified according to PFAMs or TIGRFAMs. Accordingly, Cas proteins can be identified and classified with protein domains. For example, Type II-A Cas9 proteins, including Cas9 from Streptococcus pyogenes, are of the TIGR01865 TIGRFAM protein family. In contrast, Type II-B Cas9 proteins are of the TIGR03031 TIGRFAM protein family.

[0230] Thus, in some embodiments, the stiCas9 of the present disclosure comprises a domain having at least 95% sequence similarity to any of SEQ ID NOs: 10-97 or 192-195. In some embodiments, the stiCas9 of the present disclosure comprises a domain having at least 10%, at least 20%, at least 30%, at least 40%, at least 50%, at least 60%, at least 70%, at least 80%, at least 90%, at least 95%, at least 96%, at least 97%, at least 98%, at least 99%, or about 100% sequence similarity to any of SEQ ID NOs: 10-97 or 192-195. In some embodiments, the stiCas9 of the present disclosure comprises a domain that matches the TIGR03031 protein family with an E-value cut-off of at least 1E-10, at least 1E-9, at least 1E-8, at least 1E-7, at least 1E-6, at least 1E-5, at least 1E-4, at least 1E-3, at least 1E-2, or at least 1E-1.

[0231] In some embodiments, the Type II-B Cas9 is derived from any species having a Type II-B CRISPR system. In some embodiments, the Type II-B Cas9 is derived from the following bacterial species: Legionella pneumophila, Francisella novicida, gamma proteobacterium HTCC5015, Parasutterella excrementihominis, Sutterella wadsworthensis, Sulfurospirillum sp. SCADC, Ruminobacter sp. RM87, Burkholderiales bacterium 1_1_47, Bacteroidetes oral taxon 274 str. F0058, Wolinella succinogenes, Burkholderiales bacterium YL45, Ruminobacter amylophilus, Campylobacter sp. P0111, Campylobacter sp. RM9261, Campylobacter lanienae strain RM8001, Camplylobacter lanienae strain P0121, Turicimonas muris, Legionella londiniensis, Salinivibrio sharmensis, Leptospira sp. isolate FW.030, Moritella sp. isolate NORP46, Endozoicomonassp. S-B4-1U, Tamilnaduibacter salinus, Vibrio natriegens, Arcobacter skirrowii, Francisella philomiragia, Francisella hispaniensis, or Parendozoicomonas haliclonae.

[0232] In some embodiments, the term Cas9 refers to a polypeptide comprising the amino acid sequence of Legionella pneumophila Cas9 protein. In some embodiments, the term Cas9 refers to a polypeptide comprising the amino acid sequence of Francisella novicida Cas9 protein. In some embodiments, the term Cas9 refers to a polypeptide comprising the amino acid sequence of gamma proteobacterium HTCC5015 Cas9 protein. In some embodiments, the term Cas9 refers to a polypeptide comprising the amino acid sequence of Parasutterella excrementihominis Cas9 protein. In some embodiments, the term Cas9 refers to a polypeptide comprising the amino acid sequence of Sutterella wadsworthensis Cas9 protein. In some embodiments, the term Cas9 refers to a polypeptide comprising the amino acid sequence of Sulfurospirillum sp. SCADC Cas9 protein. In some embodiments, the term Cas9 refers to a polypeptide comprising the amino acid sequence of Ruminobacter sp. RM87 Cas9 protein. In some embodiments, the term Cas9 refers to a polypeptide comprising the amino acid sequence of Burkholderiales bacterium 1_1_47 Cas9 protein. In some embodiments, the term Cas9 refers to a polypeptide comprising the amino acid sequence of Bacteroidetes oral taxon 274 str. F0058 Cas9 protein. In some embodiments, the term Cas9 refers to a polypeptide comprising the amino acid sequence of Wolinella succinogenes Cas9 protein. In some embodiments, the term Cas9 refers to a polypeptide comprising the amino acid sequence of Burkholderiales bacterium YL45 Cas9 protein. In some embodiments, the term Cas9 refers to a polypeptide comprising the amino acid sequence of Ruminobacter amylophilus strain DSM 1361 Cas9 protein. In some embodiments, the term Cas9 refers to a polypeptide comprising the amino acid sequence of Campylobacter sp. P0111 Cas9 protein. In some embodiments, the term Cas9 refers to a polypeptide comprising the amino acid sequence of Campylobacter sp. RM9261 Cas9 protein. In some embodiments, the term Cas9 refers to a polypeptide comprising the amino acid sequence of Campylobacter lanienae strain RM8001 Cas9 protein. In some embodiments, the term Cas9 refers to a polypeptide comprising the amino acid sequence of Camplylobacter lanienae strain P0121 Cas9 protein. In some embodiments, the term Cas9 refers to a polypeptide comprising the amino acid sequence of Turicimonas muris Cas9 protein. In some embodiments, the term Cas9 refers to a polypeptide comprising the amino acid sequence of Legionella londiniensis Cas9 protein. In some embodiments, the term Cas9 refers to a polypeptide comprising the amino acid sequence of Salinivibrio sharmensis Cas9 protein. In some embodiments, the term Cas9 refers to a polypeptide comprising the amino acid sequence of Leptospira sp. isolate FW.030 Cas9 protein. In some embodiments, the term Cas9 refers to a polypeptide comprising the amino acid sequence of Moritella sp. isolate NORP46 Cas9 protein. In some embodiments, the term Cas9 refers to a polypeptide comprising the amino acid sequence of Endozoicomonassp. S-B4-1U Cas9 protein. In some embodiments, the term Cas9 refers to a polypeptide comprising the amino acid sequence of Tamilnaduibacter salinus Cas9 protein. In some embodiments, the term Cas9 refers to a polypeptide comprising the amino acid sequence of Vibrio natriegens Cas9 protein. In some embodiments, the term Cas9 refers to a polypeptide comprising the amino acid sequence of Arcobacter skirrowii Cas9. In some embodiments, the term Cas9 refers to a polypeptide comprising the amino acid sequence of Francisella philomiragia Cas9. In some embodiments, the term Cas9 refers to a polypeptide comprising the amino acid sequence of Francisella hispaniensis Cas9. In some embodiments, the term Cas9 refers to a polypeptide comprising the amino acid sequence of Parendozoicomonas haliclonae Cas9. In some embodiments, the term Cas9 refers to a Cas9 polypeptide from a metagenomic sequence catalog. In some embodiments, the term Cas9 refers to a polypeptide comprising any of SEQ ID NOs: 10-97 or 192-195. See FIG. 30, SEQ ID NOs: 10-80; FIG. 31, SEQ ID NOs: 81-97; and FIG. 47, SEQ ID NOs: 192-195.

[0233] In some embodiments, the stiCas9 protein comprises a domain having a sequence of at least 70%, at least 75%, at least 80%, at least 85%, at least 90%, at least 95%, at least 96%, at least 97%, at least 98%, at least 99%, or about 100% identity with the amino acid sequence of any one of SEQ ID NOs: 10-97 or 192-195. In some embodiments, the stiCas9 protein is at least 70%, at least 75%, at least 80%, at least 85%, at least 90%, at least 95%, at least 96%, at least 97%, at least 98%, at least 99%, or about 100% identical with the amino acid sequence of any one of SEQ ID NOs: 10-97 or 192-195.

[0234] As used herein, the term “cohesive ends,” “staggered ends,” or “sticky ends” refer to a nucleic acid fragment with strands of unequal length. In contrast to “blunt ends,” cohesive ends are produced by a staggered cut on the nucleic acid, typically DNA. A sticky or cohesive end has protruding single-stranded strands with unpaired nucleotides, or “overhangs,” e.g., a 3′ or a 5′ overhang. Each overhang can anneal with another complementary overhang to form base pairs. The two complementary cohesive ends can anneal together via interactions such as hydrogen-bonding. The stability of the annealed cohesive ends depends on the melting temperature of the paired overhangs. The two complementary cohesive ends can be joined together by chemical or enzymatic ligation, for example, by DNA ligase.

[0235] Cas9 proteins were previously known to generate double-stranded DNA breaks with blunt ends (See, e.g., Jinek et al., 2012). The present disclosure provides a Cas9 protein capable of generating cohesive ends, herein also termed “stiCas9” or “sticky Cas9.” DNA fragments with cohesive ends provide an advantage over blunt ends in further applications such as, for example, inserting a nucleic acid in between the fragments and re-joining the fragments together. A DNA sequence with blunt ends does not provide specificity for inserting the nucleic acid, i.e., the nucleic acid could be inserted at either blunt end. A cohesive end, on the other hand, will only pair with a complementary cohesive end and thus enables the integration of the transgene with a preferable orientation. In some embodiments, cohesive ends facilitate the insertion of DNA through non-homologous end-joining and microhomology mediated end joining methods.

[0236] In some embodiments, the cohesive ends generated by the stiCas9 comprise a single-stranded polynucleotide overhang of 3 to 40 nucleotides. In some embodiments, the cohesive ends generated by the stiCas9 comprise a single-stranded polynucleotide overhang of 4 to 20 nucleotides. In some embodiments, the cohesive ends generated by the stiCas9 comprise a single-stranded polynucleotide overhang of 5 to 15 nucleotides. In some embodiments, the cohesive ends generated by the stiCas9 comprise a single-stranded polynucleotide overhang of 3, 4, 5, 6, 7, 8, 9, 10, 11, 12, 13, 14, 15, 16, 17, 18, 19, 20, 21, 22, 23, 24, 25, 26, 27, 28, 29, 30, 31, 32, 33, 34, 35, 36, 37, 38, 39, or 40 nucleotides. In some embodiments, the cohesive ends generated by the stiCas9 is a 5′ overhang. In some embodiments, the cohesive ends generated by the stiCas9 is a 3′ overhang.

[0237] The compositions and methods described herein can comprise a guide polynucleotide. In some embodiments, the guide polynucleotide is an RNA molecule. The RNA molecule that binds to CRISPR-Cas components and targets them to a specific location within the target DNA is referred to herein as “guide RNA,” “gRNA,” or “small guide RNA” and may also be referred to herein as a “DNA-targeting RNA.” A guide polynucleotide, e.g., guide RNA, comprises at least two nucleotide segments: at least one “DNA-binding segment” and at least one “polypeptide-binding segment.” By “segment” is meant a part, section, or region of a molecule, e.g., a contiguous stretch of nucleotides of guide polynucleotide molecule. The definition of “segment,” unless otherwise specifically defined, is not limited to a specific number of total base pairs.

[0238] In some embodiments, the DNA-binding segment of the guide polynucleotide hybridizes with a target sequence in a eukaryotic cell, but not a sequence in a bacterial cell. A sequence in a bacterial cell, as used herein, refers to a polynucleotide sequence that is native to a bacterial organism, i.e., a naturally-occurring bacterial polynucleotide sequence, or a sequence of bacterial origin. For example, the sequence can be a bacterial chromosome or bacterial plasmid, or any other polynucleotide sequence that is found naturally in bacterial cells.

[0239] In some embodiments, the polypeptide-binding segment of the guide polynucleotide binds to Cas9. In some embodiments, the polypeptide-binding segment of the guide polynucleotide binds to stiCas9.

[0240] In some embodiments, the guide polynucleotide is 10 to 150 nucleotides. In some embodiments, the guide polynucleotide is 20 to 120 nucleotides. In some embodiments, the guide polynucleotide is 30 to 100 nucleotides. In some embodiments, the guide polynucleotide is 40 to 80 nucleotides. In some embodiments, the guide polynucleotide is 50 to 60 nucleotides. In some embodiments, the guide polynucleotide is 10 to 35 nucleotides. In some embodiments, the guide polynucleotide is 15 to 30 nucleotides. In some embodiments, the guide polynucleotide is 20 to 25 nucleotides.

[0241] The guide polynucleotide, e.g., guide RNA, can be introduced into the target cell as an isolated molecule, e.g., RNA molecule, or is introduced into the cell using an expression vector containing DNA encoding the guide polynucleotide, e.g., guide RNA.

[0242] The “DNA-binding segment” (or “DNA-targeting sequence”) of the guide polynucleotide, e.g., guide RNA, comprises a nucleotide sequence that is complementary to a specific sequence within a target DNA.

[0243] The guide polynucleotide, e.g., guide RNA, of the present disclosure can include a polypeptide-binding sequence/segment. The polypeptide-binding segment (or “protein-binding sequence”) of the guide polynucleotide, e.g., guide RNA, interacts with the polynucleotide-binding domain of a Cas protein of the present disclosure. Such polypeptide-binding segments or sequences are known to those of skill in the art, e.g., those disclosed in U.S. patent application publications 2014/0068797, 2014/0273037, 2014/0273226, 2014/0295556, 2014/0295557, 2014/0349405, 2015/0045546, 2015/0071898, 2015/0071899, and 2015/0071906, the disclosures of which are incorporated herein in their entireties.

[0244] In some embodiments of the present disclosure, the stiCas9 and the guide polynucleotide can form a complex. A “complex” is a group of two or more associated nucleic acids and/or polypeptides. In some embodiments, a complex is formed when all the components of the complex are present together, i.e., a self-assembling complex. In some embodiments, a complex is formed through chemical interactions between different components of the complex such as, for example, hydrogen-bonding. In some embodiments, a guide polynucleotide forms a complex with a stiCas9 through secondary structure recognition of the guide polynucleotide by the stiCas9. In some embodiments, a stiCas9 protein is inactive, i.e., does not exhibit nuclease activity, until it forms a complex with a guide polynucleotide. Binding of guide RNA induces a conformational change in stiCas9 to convert the stiCas9 from the inactive form to an active, i.e., catalytically active, form. In embodiments of the present disclosure, the complex of the stiCas9 and guide polynucleotide does not occur in nature.

[0245] In some embodiments, the present disclosure provides a non-naturally occurring CRISPR-Cas system comprising: a Cas9 effector protein capable of generating cohesive ends (stiCas9) and comprises a nuclear localization signal (NLS), and a guide polynucleotide that forms a complex with the stiCas9 and comprises a guide sequence, wherein the complex does not occur in nature.

[0246] In some embodiments, the stiCas9 comprises one or more nuclear localization signals. A “nuclear localization signal” or “nuclear localization sequence” (NLS) is an amino acid sequence that “tags” a protein for import into the cell nucleus by nuclear transport, i.e., a protein having an NLS is transported into the cell nucleus. Typically, the NLS comprises positively-charged Lys or Arg residues exposed on the protein surface. Exemplary nuclear localization sequences include, but are not limited to the NLS from: SV40 Large T-Antigen, w, EGL-13, c-Myc, and TUS-protein. In some embodiments, the NLS comprises the sequence PKKKRKV (SEQ ID NO: 1). In some embodiments, the NLS comprises the sequence AVKRPAATKKAGQAKKKKLD (SEQ ID NO: 2). In some embodiments, the NLS comprises the sequence PAAKRVKLD (SEQ ID NO: 3). In some embodiments, the NLS comprises the sequence MSRRRKANPTKLSENAKKLAKEVEN (SEQ ID NO: 4). In some embodiments, the NLS comprises the sequence KLKIKRPVK (SEQ ID NO: 5). Other nuclear localization sequences include, but are not limited to, the acidic M9 domain of hnRNP A1, the sequence KIPIK (SEQ ID NO: 6) in yeast transcription repressor Matα2, and PY-NLSs.

[0247] In some embodiments, the present disclosure provides a non-naturally occurring CRISPR-Cas system comprising: (a) one or more nucleotides encoding a Cas9 effector protein capable of generating cohesive ends (stiCas9); and (b) a nucleotide sequence encoding a guide polynucleotide that forms a complex with the stiCas9 and comprising a guide sequence, wherein the guide sequence hybridizes with a target sequence in a eukaryotic cell but does not hybridize to a sequence in a bacterial cell, and wherein the complex does not occur in nature.

[0248] In some embodiments, the stiCas9 protein is encoded by one or more polynucleotides. In some embodiments, the polynucleotide is DNA. In some embodiments, the polynucleotide is RNA.

[0249] In some embodiments, the stiCas9 is encoded by one or more polynucleotides derived from Legionella pneumophila Cas9 protein. In some embodiments, the stiCas9 is encoded by one or more polynucleotides derived from Francisella novicida Cas9 protein. In some embodiments, the stiCas9 is encoded by one or more polynucleotides derived from gamma proteobacterium HTCC5015 Cas9 protein. In some embodiments, the stiCas9 is encoded by one or more polynucleotides derived from Parasutterella excrementihominis Cas9 protein. In some embodiments, the stiCas9 is encoded by one or more polynucleotides derived from Sutterella wasworthensis Cas9 protein. In some embodiments, the stiCas9 is encoded by one or more polynucleotides derived from Sulfurospirillum sp. SCADC Cas9 protein. In some embodiments, the stiCas9 is encoded by one or more polynucleotides derived from Ruminobacter sp. RM87 Cas9 protein. In some embodiments, the stiCas9 is encoded by one or more polynucleotides derived from Burkholderiales bacterium 1_1_47 Cas9 protein. In some embodiments, the stiCas9 is encoded by one or more polynucleotides derived from Bacteroidetes oral taxon 274 str. F0058 Cas9 protein. In some embodiments, the stiCas9 is encoded by one or more polynucleotides derived from Wolinella succinogenes Cas9 protein. In some embodiments, the stiCas9 is encoded by one or more polynucleotides derived from Burkholderiales bacterium YL45 Cas9 protein. In some embodiments, the stiCas9 is encoded by one or more polynucleotides derived from Ruminobacter amylophilus strain DSM 1361 Cas9 protein. In some embodiments, the stiCas9 is encoded by one or more polynucleotides derived from Campylobacter sp. P0111 Cas9 protein. In some embodiments, the stiCas9 is encoded by one or more polynucleotides derived from Campylobacter sp. RM9261 Cas9 protein. In some embodiments, the stiCas9 is encoded by one or more polynucleotides derived from Campylobacter lanienae strain RM8001 Cas9 protein. In some embodiments, the stiCas9 is encoded by one or more polynucleotides derived from Camplylobacter lanienae strain P0121 Cas9 protein. In some embodiments, the stiCas9 is encoded by one or more polynucleotides derived from Turicimonas muris Cas9 protein. In some embodiments, the stiCas9 is encoded by one or more polynucleotides derived from Legionella londiniensis Cas9 protein. In some embodiments, the stiCas9 is encoded by one or more polynucleotides derived from Salinivibrio sharmensis Cas9 protein. In some embodiments, the stiCas9 is encoded by one or more polynucleotides derived from Leptospira sp. isolate FW.030 Cas9 protein. In some embodiments, the stiCas9 is encoded by one or more polynucleotides derived from Moritella sp. isolate NORP46 Cas9 protein. In some embodiments, the stiCas9 is encoded by one or more polynucleotides derived from Endozoicomonassp. S-B4-1U Cas9 protein. In some embodiments, the stiCas9 is encoded by one or more polynucleotides derived from Tamilnaduibacter salinus Cas9 protein. In some embodiments, the stiCas9 is encoded by one or more polynucleotides derived from Vibrio natriegens Cas9 protein. In some embodiments, the stiCas9 is encoded by one or more polynucleotides derived from Arcobacter skirrowii Cas9 protein. In some embodiments, the stiCas9 is encoded by one or more polynucleotides derived from Francisella philomiragia Cas9 protein. In some embodiments, the stiCas9 is encoded by one or more polynucleotides derived from Francisella hispaniensis Cas9 protein. In some embodiments, the stiCas9 is encoded by one or more polynucleotides derived from Parendozoicomonas haliclonae Cas9 protein.

[0250] In some embodiments, the stiCas9 of the present disclosure comprises a domain that matches the TIGR03031 protein family with an E-value cut-off of at least 1E-10, at least 1E-9, at least 1E-8, at least 1E-7, at least 1E-6, at least 1E-5, at least 1E-4, at least 1E-3, at least 1E-2, or at least 1E-1.

[0251] In some embodiments, the guide polynucleotide of the CRISPR-Cas system is encoded by a nucleotide sequence. In some embodiments, the nucleotide sequence is DNA. In some embodiments, the guide polynucleotide is guide RNA. In some embodiments, the guide sequence of the guide polynucleotide is a DNA-targeting sequence.

[0252] In some embodiments, the nucleotide sequence encoding a stiCas9 is codon optimized. An example of a codon optimized sequence is, in this instance, a sequence optimized for expression in a eukaryote, e.g., humans (i.e., being optimized for expression in humans), or for another eukaryote, animal, or mammal as discussed herein; see, e.g., SaCas9 human codon optimized sequence in WO 2014/093622 as an example of a codon optimized sequence (from knowledge in the art and this disclosure, codon optimizing coding nucleic acid molecule(s), especially as to effector protein (e.g., Cas9) is within the ambit of the skilled artisan). Other examples are possible and codon optimization for a host species other than human, or for codon optimization for specific organs is known. In some embodiments, an enzyme coding sequence encoding a DNA/RNA-targeting Cas protein is codon optimized for expression in particular cells, such as eukaryotic cells. The eukaryotic cells may be those of or derived from a particular organism, such as a plant or a mammal, including but not limited to human, or non-human eukaryote or animal or mammal as herein discussed, e.g., mouse, rat, rabbit, dog, livestock, or non-human mammal or primate. In some embodiments, processes for modifying the germ line genetic identity of human beings and/or processes for modifying the genetic identity of animals which are likely to cause them suffering without any substantial medical benefit to man or animal, and also animals resulting from such processes, are excluded. In general, codon optimization refers to a process of modifying a nucleic acid sequence for enhanced expression in the host cells of interest by replacing at least one codon (e.g., about or more than about 1, 2, 3, 4, 5, 10, 15, 20, 25, 50, or more codons) of the native sequence with codons that are more frequently or most frequently used in the genes of that host cell while maintaining the native amino acid sequence. Various species exhibit particular bias for certain codons of a particular amino acid. Codon bias (differences in codon usage between organisms) often correlates with the efficiency of translation of messenger RNA (mRNA), which is in turn believed to be dependent on, among other things, the properties of the codons being translated and the availability of particular transfer RNA (tRNA) molecules. The predominance of selected tRNAs in a cell is generally a reflection of the codons used most frequently in peptide synthesis. Accordingly, genes can be tailored for optimal gene expression in a given organism based on codon optimization. Codon usage tables are readily available, for example, at the “Codon Usage Database” (www.kazusa.orjp/codon/), and these tables can be adapted in a number of ways. See Nakamura et al., “Codon usage tabulated from the international DNA sequence databases: status for the year 2000,” Nucleic Acids Research 28: 292 (2000). Computer algorithms for codon optimizing a particular sequence for expression in a particular host cell are also available. In some embodiments, one or more codons (e.g., 1, 2, 3, 4, 5, 10, 15, 20, 25, 50, or more, or all codons) in a sequence encoding a DNA/RNA-targeting Cas protein corresponds to the most frequently used codon for a particular amino acid. As to codon usage in yeast, reference is made to the online Yeast Genome database (www.yeastgenome.org/community/codon_usage.shtml), or Bennetzen and Hall, “Codon selection in yeast,” Journal of Biological Chemistry, 257(6): 3026-31 (1982). As to codon usage in plants including algae, reference is made to Campbell and Gowri, “Codon usage in higher plants, green algae, and cyanobacteria,” Plant Physiology 92(1): 1-11 (1990); as well as Murray et al., “Codon usage in plant genes,” Nucleic Acids Research 17(2): 477-98 (1989); or Morton, “Selection on the codon bias of chloroplast and cyanelle genes in different plant and algal lineages,” Molecular Evolution 46(4): 449-59 (1998). In some embodiments, one or more of SEQ ID NOS: 10-97 or 192-195 are codon optimized.

[0253] In some embodiments, the nucleotide sequence encoding a stiCas9 is codon optimized for expression in a eukaryotic cell. In some embodiments, the nucleotide sequence encoding a stiCas9 is codon optimized for expression in an animal cell. In some embodiments, the nucleotide sequence encoding a stiCas9 is codon optimized for expression in a human cell. The nucleotide sequence encoding a stiCas9 is codon optimized for expression in a plant cell. Codon optimization is the adjustment of codons to match the expression host's tRNA abundance in order to increase yield and efficiency of recombinant or heterologous protein expression. Codon optimization methods are routine in the art and may be performed using software programs such as, for example, Integrated DNA Technologies' Codon Optimization tool, Entelechon's Codon Usage Table analysis tool, GENEMAKER's Blue Heron software, Aptagen's Gene Forge software, DNA Builder Software, General Codon Usage Analysis software, the publicly available OPTIMIZER software, and Genscript's OptimumGene algorithm.

[0254] In some embodiments, the CRISPR-Cas systems of the present disclosure further comprise a tracrRNA. A “tracrRNA,” or trans-activating CRISPR-RNA, forms an RNA duplex with a pre-crRNA, or pre-CRISPR-RNA, and is then cleaved by the RNA-specific ribonuclease RNase III to form a crRNA/tracrRNA hybrid. In some embodiments, the guide RNA comprises the crRNA/tracrRNA hybrid. In some embodiments, the tracrRNA component of the guide RNA activates the Cas9 protein.

[0255] In some embodiments of the present disclosure, the stiCas9, guide polynucleotide, and tracrRNA are capable of forming a complex. In some embodiments, the complex of the stiCas9, guide polynucleotide, and tracrRNA does not occur in nature.

[0256] In some embodiments, the present disclosure provides a non-naturally occurring CRISPR-Cas system comprising one or more vectors comprising: (a) a regulatory element operably linked to one or more nucleotide sequences encoding a Cas9 effector protein capable of generating cohesive ends (stiCas9); (b) a guide polynucleotide that forms a complex with the stiCas9 and comprising a guide sequence, wherein the guide sequence is capable of hybridizing with a target sequence in a eukaryotic cell but does not hybridize to a sequence in a bacterial cell; wherein the complex does not occur in nature. It is understood by the skilled artisan that a vector comprising “a guide polynucleotide that forms a complex with the stiCas9 and comprising a guide sequence” would also include a vector comprising a polynucleotide sequence which can be transcribed to the guide polynucleotide. For example, the DNA vector can be transcribed to produce a guide RNA sequence.

[0257] In some embodiments, the present disclosure provides a non-naturally occurring CRISPR-Cas system comprising one or more vectors comprising: a regulatory element operably linked to one or more nucleotide sequences encoding a Cas9 effector protein capable of generating cohesive ends (stiCas9), wherein the regulatory element is a eukaryotic regulatory element, and a guide polynucleotide that forms a complex with the stiCas9 and comprises a guide sequence, wherein the complex does not occur in nature.

[0258] In some embodiments, the regulatory element is a promoter. In some embodiments, the regulatory element is a bacterial promoter. In some embodiments, the regulatory element is a viral promoter. In some embodiments, the regulatory element is a eukaryotic regulatory element, i.e., a eukaryotic promoter. In some embodiments, the eukaryotic regulatory element is a mammalian promoter.

[0259] “Operably linked” means that the nucleotide of interest, i.e., the nucleotide encoding a Cas9 protein, is linked to the regulatory element in a manner that allows for expression of the nucleotide sequence. Thus, in some embodiments, the vector is an expression vector.

[0260] In some embodiments, the guide polynucleotide of the vector comprising the CRISPR-Cas system is encoded by a nucleotide sequence. In some embodiments, the nucleotide sequence is DNA. In some embodiments, the guide polynucleotide is guide RNA. In some embodiments, the guide sequence of the guide polynucleotide is a DNA-targeting sequence.

[0261] In some embodiments, the stiCas9 and guide polynucleotide are capable of forming a complex. In some embodiments, the complex of the stiCas9 and guide polynucleotide does not occur in nature.

[0262] In some embodiments, the vector further comprises a nucleotide sequence comprising a tracrRNA sequence. In some embodiments, the guide RNA comprises the crRNA/tracrRNA hybrid. In some embodiments, the tracrRNA component of the guide RNA activates the Cas9 protein.

[0263] In some embodiments, the CRISPR-Cas system as described herein is capable of cleaving at a site within 10 nucleotides of a Protospacer Adjacent Motif. A Protospacer Adjacent Motif, or PAM, is a 2-6 base pair nucleotide sequence located within one nucleotide of the region complementary to the guide RNA. When Cas9 protein is activated (for example, by formation of a complex with the guide polynucleotide), it searches for target DNA by binding with sequences that match its PAM sequence. See, e.g., Sternberg et al., “DNA interrogation by the CRISPR RNA-guided endonuclease Cas9,” Nature 507(7490): 62-67 (2014), which is incorporated by reference herein in its entirety. Upon recognition of a potential target sequence with the appropriate PAM, and the guide RNA pairs properly with the target region, the nuclease domains of Cas9 (i.e., the RuvC and HNH domains) cut the target DNA.

[0264] In some embodiments, the RuvC and HNH domains of the Cas9 proteins of the present disclosure each cut one strand of the target DNA sequence. In embodiments, the cut sites of the RuvC and HNH domains of a stiCas9 protein are offset, i.e., each domain cuts at a different position on its respective strand of the target DNA, resulting in an overhang. In embodiments, the RuvC and HNH domains of the stiCas9 protein cut at a 3-nucleotide offset. In embodiments, the RuvC and HNH domains of the stiCas9 protein cut at a 4-nucleotide offset. In embodiments, the RuvC and HNH domains of the stiCas9 protein cut at a 5-nucleotide offset. In embodiments, the RuvC and HNH domains of the stiCas9 protein cut at an offset of about 1, about 2, about 3, about 4, about 5, about 6, about 7, about 8, about 9, about 10, about 11, about 12, about 13, about 14, about 15, about 16, about 17, about 18, about 19, about 20, about 21, about 22, about 23, about 24, about 25, about 26, about 27, about 28, about 29, about 30, about 31, about 32, about 33, about 34, about 35, about 36, about 37, about 38, about 39, or about 40 nucleotides.

[0265] In some embodiments, the RuvC and HNH domains of a Cas9 effector protein of the present disclosure cleaves at different positions on each strand of the double-stranded target DNA. In some embodiments, the RuvC domain of the Cas9 effector protein cleaves one strand of the double-stranded target DNA (which can be referred to, for example, as the “non-target strand”) at from about −10, about −9, about −8, about −7, or about −6 nucleotides from the PAM, and the HNH domain of the Cas9 effector protein cleaves the other strand of the double-stranded target DNA (which can be referred to, for example, as the “target strand”) at −5, about −4, about −3, about −2, or about −1 nucleotides from the PAM.

[0266] In some embodiments, the RuvC domain cleaves one strand of the double-stranded target DNA at about −8 nucleotides from the PAM. In some embodiments, the RuvC domain cleaves one strand of the double-stranded target DNA at about −7 nucleotides from the PAM. In some embodiments, the RuvC domain cleaves one strand of the double-stranded target DNA at about −6 nucleotides from the PAM. In some embodiments, the HNH domain cleaves one strand of the double-stranded target DNA at about −4 nucleotides from the PAM. In some embodiments, the HNH domain cleaves one strand of the double-stranded target DNA at about −3 nucleotides from the PAM. In some embodiments, the HNH domain cleaves one strand of the double-stranded target DNA at about −2 nucleotides from the PAM.

[0267] In some embodiments of the present disclosure, the complex comprising stiCas9 and a guide polynucleotide is capable of cleaving at a site within 10 nucleotides of a Protospacer Adjacent Motif (PAM). In some embodiments, the complex comprising stiCas9 and a guide polynucleotide is capable of cleaving at a site within 5 nucleotides of a PAM. In some embodiments, the complex comprising stiCas9 and a guide polynucleotide is capable of cleaving at a site within 3 nucleotides of a PAM. In some embodiments, the PAM is downstream (i.e., 3′ direction) of the target sequence. In some embodiments, the PAM is upstream (i.e., 5′ direction) of the target sequence. In some embodiments, the PAM is located within the target sequence.

[0268] Different bacterial species recognize different PAM sequences. One method of identifying the preferred PAM sequence for a Cas9 protein of the present disclosure is illustrated in FIG. 49A and includes, for example, generating a plasmid library of various PAM sequences adjacent to a target sequence, contacting the plasmid library with a Cas9 protein, then sequencing the plasmid library to determine which PAM sequences have been “depleted” (i.e., not detected in the sequencing results). The “depleted” PAM sequences are the ones that are recognized and effected upon (i.e., cleaved) by the Cas9 protein.

[0269] For example, the PAM sequence recognized by the Cas9 of Streptococcus pyogenes is 5′-NGG-3′, wherein N is any nucleotide. Different PAMs are associated with the Cas9 proteins of Neisseria meningitidis, Treponema denticola, and Streptococcus thermophilus. The Cas9 protein of Francisella novicida has been engineered to recognize the PAM 5′-YG-3′, wherein Y is a pyrimidine.

[0270] In some embodiments, the PAM comprises a 3′ G-rich motif. In some embodiments, the PAM sequence is NGG, wherein N is A, C, T, U, or G. In some embodiments, the PAM sequence is NGA, wherein N is A, C, T, U, or G. In some embodiments, the PAM sequence is YG, wherein Y is a pyrimidine (i.e., C, T, or U).

[0271] In some embodiments, the target sequence is 5′ of a PAM and the PAM comprises a 3′ G-rich motif. In some embodiments, the target sequence is 5′ of a PAM and the PAM sequence is NGG, wherein N is A, C, T, U, or G. In some embodiments, the target sequence is 5′ of a PAM, the PAM sequence is YG, wherein Y is a pyrimidine, and the stiCas9 is derived from the bacterial species Francisella novicida.

[0272] In some embodiments, the stiCas9 comprises one or more nuclear localization signals. A “nuclear localization signal” or “nuclear localization sequence” (NLS) is an amino acid sequence that “tags” a protein for import into the cell nucleus by nuclear transport, i.e., a protein having an NLS is transported into the cell nucleus. Typically, the NLS comprises positively-charged Lys or Arg residues exposed on the protein surface. Exemplary nuclear localization sequences include, but are not limited to the NLS from: SV40 Large T-Antigen, nucleoplasmin, EGL-13, c-Myc, and TUS-protein. In some embodiments, the NLS comprises the sequence PKKKRKV (SEQ ID NO: 1). In some embodiments, the NLS comprises the sequence AVKRPAATKKAGQAKKKKLD (SEQ ID NO: 2). In some embodiments, the NLS comprises the sequence PAAKRVKLD (SEQ ID NO: 3). In some embodiments, the NLS comprises the sequence MSRRRKANPTKLSENAKKLAKEVEN (SEQ ID NO: 4). In some embodiments, the NLS comprises the sequence KLKIKRPVK (SEQ ID NO: 5). Other nuclear localization sequences include, but are not limited to, the acidic M9 domain of hnRNP A1, the sequence KIPIK (SEQ ID NO: 6) in yeast transcription repressor Matα2, and PY-NLSs.

[0273] In some embodiments, the guide polynucleotide of the present disclosure has a guide sequence that hybridizes to a target sequence in a eukaryotic cell. In some embodiments, the eukaryotic cell is an animal or human cell. In some embodiments, the eukaryotic cell is a human or rodent or bovine cell line or cell strain. Examples of such cells, cell lines, or cell strains include, but are not limited to, mouse myeloma (NSO)-cell lines, Chinese hamster ovary (CHO)-cell lines, HT1080, H9, HepG2, MCF7, MDBK Jurkat, NIH3T3, PC12, BHK (baby hamster kidney cell), VERO, SP2/0, YB2/0, Y0, C127, L cell, COS, e.g., COS1 and COS7, QC1-3, HEK-293, VERO, PER.C6, HeLA, EB1, EB2, EB3, oncolytic or hybridoma-cell lines. In some embodiments, the eukaryotic cells are CHO-cell lines. In some embodiments, the eukaryotic cell is a CHO cell. In some embodiments, the cell is a CHO-K1 cell, a CHO-K1 SV cell, a DG44 CHO cell, a DUXB11 CHO cell, a CHOS, a CHO GS knock-out cell, a CHO FUT8 GS knock-out cell, a CHOZN, or a CHO-derived cell. The CHO GS knock-out cell (e.g., GSKO cell) is, for example, a CHO-K1 SV GS knockout cell. The CHO FUT8 knockout cell is, for example, the Potelligent® CHOK1 SV (Lonza Biologics, Inc.). Eukaryotic cells can also be avian cells, cell lines or cell strains, such as, for example, EBx® cells, EB14, EB24, EB26, EB66, or EBv13.

[0274] In some embodiments, the eukaryotic cell is a human cell. In some embodiments, the human cell is a stem cell. The stem cells can be, for example, pluripotent stem cells, including embryonic stem cells (ESCs), adult stem cells, induced pluripotent stem cells (iPSCs), tissue specific stem cells (e.g., hematopoietic stem cells) and mesenchymal stem cells (MSCs). In some embodiments, the human cell is a differentiated form of any of the cells described herein. In some embodiments, the eukaryotic cell is a cell derived from any primary cell in culture.

[0275] In some embodiments, the eukaryotic cell is a hepatocyte such as a human hepatocyte, animal hepatocyte, or a non-parenchymal cell. For example, the eukaryotic cell can be a plateable metabolism qualified human hepatocyte, a plateable induction qualified human hepatocyte, plateable Qualyst Transporter Certified™ human hepatocyte, suspension qualified human hepatocyte (including 10-donor and 20-donor pooled hepatocytes), human hepatic kupffer cells, human hepatic stellate cells, dog hepatocytes (including single and pooled Beagle hepatocytes), mouse hepatocytes (including CD-1 and C57BI/6 hepatocytes), rat hepatocytes (including Sprague-Dawley, Wistar Han, and Wistar hepatocytes), monkey hepatocytes (including Cynomolgus or Rhesus monkey hepatocytes), cat hepatocytes (including Domestic Shorthair hepatocytes), and rabbit hepatocytes (including New Zealand White hepatocytes).

[0276] In some embodiments, the eukaryotic cell is a plant cell. For example, the plant cell can be of a crop plant such as cassava, corn, sorghum, wheat, or rice. The plant cell can be of an algae, tree, or vegetable. The plant cell can be of a monocot or dicot or of a crop or grain plant, a production plant, fruit, or vegetable. For example, the plant cell can be of a tree, e.g., a citrus tree such as orange, grapefruit, or lemon tree; peach or nectarine trees; apple or pear trees; nut trees such as almond or walnut or pistachio trees; nightshade plants, e.g., potatoes, plants of the genus Brassica, plants of the genus Lactuca; plants of the genus Spinacia; plants of the genus Capsicum; cotton, tobacco, asparagus, carrot, cabbage, broccoli, cauliflower, tomato, eggplant, pepper, lettuce, spinach, strawberry, blueberry, raspberry, blackberry, grape, coffee, cocoa, etc.

[0277] In some embodiments, the guide polynucleotide of the CRISPR-Cas system is linked to a direct repeat sequence. A direct repeat, or DR, sequence is an array of repetitive sequences in the CRISPR locus, interspaced by short stretches of non-repetitive sequences (spacers). The spacer sequences target the Protospacer Adjacent Motifs (PAM) on the target sequence. When the non-coding portion of the CRISPR locus (i.e., the guide polynucleotide and the tracrRNA) is transcribed, the transcript is cleaved at the DR sequences into short crRNAs containing individual spacer sequences, which direct the Cas9 nuclease to the PAM. In some embodiments, the DR sequence is RNA. In some embodiments, the DR sequence is encoded by a nucleic acid. In some embodiments, the DR sequence is linked to the guide polynucleotide. In some embodiments, the DR sequence is linked to the guide sequence of the guide polynucleotide. In some embodiments, the DR sequence comprises a secondary structure. In some embodiments, the DR sequence comprises a stem loop structure. In some embodiments, the DR sequence is 10 to 20 nucleotides. In some embodiments, the DR sequence is at least 16 nucleotides. In some embodiments, the DR sequence is at least 16 nucleotides and comprises a single stem loop. In some embodiments, the DR sequence comprises an RNA aptamer. In some embodiments, the secondary structure or stem loop in the DR is the recognized by a nuclease for cleavage. In some embodiments, the nuclease is a ribonuclease. In some embodiments, the nuclease is RNase III.

[0278] Various means are known in the art for delivery of CRISPR-Cas systems. In some embodiments, the CRISPR-Cas system of the present disclosure is delivered by a delivery particle. A delivery particle is a biological delivery system or formulation which includes a particle. A “particle,” as defined herein, is an entity having a maximum diameter of about 100 microns (μm). In some embodiments, the particle has a maximum diameter of about 10 μm. In some embodiments, the particle has a maximum diameter of about 2000 nanometers (nm). In some embodiments, the particle has a maximum diameter of about 1000 nm. In some embodiments, the particle has a maximum diameter of about 900 nm, about 800 nm, about 700 nm, about 600 nm, about 500 nm, about 400 nm, about 300 nm, about 200 nm, or about 100 nm. In some embodiments, the particle has a diameter of about 25 nm to about 200 nm. In some embodiments, the particle has a diameter of about 50 nm to about 150 nm. In some embodiments, the particle has a diameter of about 75 nm to about 100 nm.

[0279] Delivery particles may be provided in any form, including but not limited to: solid, semi-solid, emulsion, or colloidal particles. In some embodiments, the delivery particle is a lipid-based system, a liposome, a micelle, a microvesicle, an exosome, or a gene gun. In some embodiments, the delivery particle comprises a CRISPR-Cas system. In some embodiments, the delivery particle comprises a CRISPR-Cas system comprising a stiCas9 and a guide polynucleotide. In some embodiments, the delivery particle comprises a CRISPR-Cas system comprising a stiCas9 and a guide polynucleotide, wherein the stiCas9 and the guide polynucleotide are in a complex. In some embodiments, the delivery particle comprises a CRISPR-Cas system comprising a stiCas9, a guide polynucleotide, and polynucleotide comprising a tracrRNA. In some embodiments, the delivery particle comprises a CRISPR-Cas system comprising a stiCas9, a guide polynucleotide, and a tracrRNA.

[0280] In some embodiments, the delivery particle further comprises a lipid, a sugar, a metal or a protein. In some embodiments, the delivery particle is a lipid envelope. Delivery of mRNA using lipid envelopes or delivery particles comprising lipids is described, for example, in Su et al., “In vitro and in vivo mRNA delivery using lipid-enveloped pH-responsive polymer nanoparticles,” Molecular Pharmacology 8(3): 774-784 (2011).

[0281] In some embodiments, the delivery particle is a sugar-based particle, for example, GalNAc. Sugar-based particles are described in WO 2014/118272 and Nair et al., Journal of the American Chemical Society 136(49): 16958-16961 (2014), each of which is incorporated by reference herein in its entirety.

[0282] In some embodiments, the delivery particle is a nanoparticle. Nanoparticles encompassed in the present disclosure may be provided in different forms, e.g., as solid nanoparticles (e.g., metal such as silver, gold, iron, titanium), non-metal, lipid-based solids, polymers, suspensions of nanoparticles, or combinations thereof. Metal, dielectric, and semiconductor nanoparticles may be prepared, as well as hybrid structures (e.g., core-shell nanoparticles). Nanoparticles made of semiconducting material may also be labeled quantum dots if they are small enough (typically sub 10 nm) that quantization of electronic energy levels occurs. Such nanoscale particles are used in biomedical applications as drug carriers or imaging agents and may be adapted for similar purposes in the present disclosure.

[0283] Preparation of delivery particles is further described in U.S. Patent Publication Nos. 2011/0293703, 2012/0251560, and 2013/0302401; and U.S. Pat. Nos. 5,543,158, 5,855,913, 5,895,309, 6,007,845, and 8,709,843, each of which is incorporated by reference herein in its entirety.

[0284] In some embodiments, a vesicle comprises the CRISPR-Cas system of the present disclosure. A “vesicle” is a small structure within a cell having a fluid enclosed by a lipid bilayer. In some embodiments, the CRISPR-Cas system of the present disclosure is delivered by a vesicle. In some embodiments, the vesicle comprises a stiCas9 and a guide polynucleotide. In some embodiments, the vesicle comprises a stiCas9 and a guide polynucleotide, wherein the stiCas9 and the guide polynucleotide are in a complex. In some embodiments, the vesicle comprises a CRISPR-Cas system comprising a stiCas9, a guide polynucleotide, and polynucleotide comprising a tracrRNA. In some embodiments, the vesicle comprises a CRISPR-Cas system comprising a stiCas9, a guide polynucleotide, and a tracrRNA.

[0285] In some embodiments, the vesicle comprising the stiCas9 and guide polynucleotide is an exosome or a liposome. In some embodiments, the vesicle is an exosome. In some embodiments, the exosome is used to deliver the CRISPR-Cas systems of the present disclosure. Exosomes are endogenous nano-vesicles (i.e., having a diameter of about 30 to about 100 nm) that transport RNAs and proteins, and which can deliver RNA to the brain and other target organs. Engineered exosomes for delivery of exogenous biological materials into target organs is described, for example, by Alvarez-Erviti et al., Nature Biotechnology 29: 341 (2011), El-Andaloussi et al., Nature Protocols 7: 2112-2116 (2012), and Wahlgren et al., Nucleic Acids Research 40(17): e130 (2012), each of which is incorporated by reference herein in its entirety.

[0286] In some embodiments, the vesicle comprising the stiCas9 and guide polynucleotide is a liposome. In some embodiments, the liposome is used to deliver the CRISPR-Cas systems of the present disclosure. Liposomes are spherical vesicle structures having at least one lipid bilayer and can be used as a vehicle for administration of nutrients and pharmaceutical drugs. Liposomes are often composed of phospholipids, in particular phosphatidylcholine, but also other lipids such as egg phosphatidylethanolamine. Types of liposomes include, but are not limited to, multilamellar vesicle, small unilamellar vesicle, large unilamellar vesicle, and cochleate vesicle. See, e.g., Spuch and Navarro, “Liposomes for Targeted Delivery of Active Agents against Neurodegenerative Diseases (Alzheimer's Disease and Parkinson's Disease), Journal of Drug Delivery 2011, Article ID 469679 (2011). Liposomes for delivery of biological materials such as CRISPR-Cas components are described, for example, by Morrissey et al., Nature Biotechnology 23(8): 1002-1007 (2005), Zimmerman et al., Nature Letters 441: 111-114 (2006), and Li et al., Gene Therapy 19: 775-780 (2012), each of which is incorporated by reference herein in its entirety.

[0287] In some embodiments, the nucleotide encoding a Cas9 and a guide polynucleotide is on a single vector. In some embodiments, a nucleotide encoding a Cas9, a guide polynucleotide (or nucleotide that can be transcribed into a guide polynucleotide), and a tracrRNA are on a single vector. In some embodiments, the nucleotide encoding a Cas9, a guide polynucleotide (or nucleotide that can be transcribed into a guide polynucleotide), a tracrRNA, and a direct repeat sequence are on a single vector. In some embodiments, the vector is an expression vector. In some embodiments, the vector is a mammalian expression vector. In some embodiments, the vector is a human expression vector. In some embodiments, the vector is a plant expression vector.

[0288] In some embodiments, the nucleotide encoding a Cas9 and a guide polynucleotide is a single nucleic acid molecule. In some embodiments, the nucleotide encoding a Cas9, a guide polynucleotide, and a tracrRNA is a single nucleic acid molecule. In some embodiments, the nucleotide encoding a Cas9, a guide polynucleotide, a tracrRNA, and a direct repeat sequence is a single nucleic acid molecule. In some embodiments, the single nucleic acid molecule is an expression vector. In some embodiments, the single nucleic acid molecule is a mammalian expression vector. In some embodiments, the single nucleic acid molecule is a human expression vector. In some embodiments, the single nucleic acid molecule is a plant expression vector.

[0289] In some embodiments, a viral vector comprises the CRISPR-Cas systems of the present disclosure. In some embodiments, the CRISPR-Cas system of the present disclosure is delivered by a viral vector. In some embodiments, the viral vector comprises a stiCas9 and a guide polynucleotide. In some embodiments, the viral vector comprises a stiCas9 and a guide polynucleotide, wherein the stiCas9 and the guide polynucleotide are in a complex. In some embodiments, the viral vector comprises a CRISPR-Cas system comprising a stiCas9, a guide polynucleotide, and polynucleotide comprising a tracrRNA. In some embodiments, the viral vector comprises a CRISPR-Cas system comprising a stiCas9, a guide polynucleotide, and a tracrRNA. In some embodiments, the viral vector is of an adenovirus, a lentivirus, or an adeno-associated virus. Examples of viral vectors are provided herein.

[0290] In some embodiments, adeno-associated virus (AAV) and/or lentiviral vectors can be used as a viral vector comprising the elements of the CRISPR-Cas systems as described herein. In some embodiments of the present disclosure, the Cas protein is expressed intracellularly by cells transduced by a viral vector.

[0291] For many therapeutic strategies, included those envisaged by the present disclosure, Cas protein expression may only be required transiently. As a result, in some embodiments of the present disclosure, delivery of the Cas protein into cells is achieved using non-integrative viral vectors. In other embodiments, the expression of CRISPR-Cas system components is required for extended periods—for example, when used in gene circuits which are permanently integrated into the genome of target cells. Such applications have been discussed by Agustín-Pavón, et al., “Synthetic biology and therapeutic strategies for the degenerating brain,” Bioessays 36(10): 979-990 (2014), which is incorporated by reference herein in its entirety.

[0292] In some embodiments, the Cas proteins and methods of the present disclosure are used in ex vivo gene editing, such as CAR-T type therapies. These embodiments may involve modification of cells from human donors. In these instances, viral vectors can be also used; however, there is the additional option to directly transfect the Cas protein (along with in vitro transcribed guide RNA and donor DNA) into cultured cells.

[0293] In some embodiments, the present disclosure provides a eukaryotic cell comprising a CRISPR-Cas system comprising: (a) a Cas9 effector protein capable of generating cohesive ends (stiCas9), and (b) a guide polynucleotide that forms a complex with the stiCas9 and comprising a guide sequence, wherein the guide sequence is capable of hybridizing with a target sequence in the eukaryotic cell wherein the complex does not occur in nature. In some embodiments, the eukaryotic cell comprises a vector comprising the CRISPR-Cas system of the present disclosure.

[0294] In some embodiments, the eukaryotic cell is an animal or human cell. In some embodiments, the eukaryotic cell is an animal cell. In some embodiments, the eukaryotic cell is a human cell, including human stem cell. In some embodiments, the eukaryotic cell is a plant cell. Examples of various types of eukaryotic cells are provided herein.

[0295] In some embodiments, the present disclosure provides a eukaryotic cell comprising a CRISPR-Cas system comprising a Cas9 effector protein capable of generating cohesive ends (stiCas9), wherein the Cas9 effector protein is derived from a bacterial species having a Type II-B CRISPR system. In some embodiments, the eukaryotic cell comprises a stiCas9 comprising a domain that matches the TIGR03031 protein family with an E-value cut-off of at least 1E-10, at least 1E-9, at least 1E-8, at least 1E-7, at least 1E-6, at least 1E-5, at least 1E-4, at least 1E-3, at least 1E-2, or at least 1E-1. In some embodiments, the eukaryotic cell comprises a stiCas9 comprising a polypeptide sequence of at least 50%, at least 60%, at least 70%, at least 80%, at least 90%, at least 95%, at least 96%, at least 97%, at least 98%, or at least 99% sequence similarity to any one of SEQ ID NOs: 10-97 or 192-195. In some embodiments, the eukaryotic cell comprises a stiCas9 comprising a polypeptide sequence having at least 70%, at least 75%, at least 80%, at least 85%, at least 90%, at least 95%, at least 96%, at least 97%, at least 98%, at least 99%, or 100% identity with any one of SEQ ID NOs: 10-97 or 192-195.

[0296] In some embodiments, the Cas9 proteins of the present disclosure are part of a fusion protein comprising one or more heterologous protein domains (e.g., about or at least about 1, 2, 3, 4, 5, 6, 7, 8, 9, or 10 or more domains in addition to the Cas9 protein). A Cas9 fusion protein can comprise any additional protein sequence, and optionally a linker sequence between any two domains. Examples of protein domains that may be fused to a Cas9 protein include, without limitation: epitope tags, reporter gene sequences, and protein domains having one or more of the following activities: methylase activity, demethylase activity, transcription activation activity, transcription repression activity, transcription release factor activity, histone modification activity, RNA cleavage activity, and nucleic acid binding activity. Non-limiting examples of epitope tags include: histidine (His) tags, V5 tags, FLAG tags, influenza hemagglutinin (HA) tags, Myc tags, VSV-G tags, and thioredoxin (Trx) tags. Examples of reporter genes include, but are not limited to, glutathione-5-transferase (GST), horseradish peroxidase (HRP), chloramphenicol acetyltransferase (CAT), beta-galactosidase, beta-glucuronidase, luciferase, green fluorescent protein (GFP), HcRed, DsRed, cyan fluorescent protein (CFP), yellow fluorescent protein (YFP), autofluorescent proteins including blue fluorescent protein (BFP), and mCherry. In some embodiments, a Cas9 protein is fused to a protein or a fragment of a protein that binds DNA molecules or bind other cellular molecules, including but not limited to: maltose binding protein (MBP), S-tag, Lex A DNA binding domain (DBD), GAL4 DNA binding domain, and herpes simplex virus (HSV) BP16 protein. Additional domains that may form part of a fusion protein comprising a Cas9 protein are described in US20110059502, incorporated herein by reference in its entirety. In some embodiments, a tagged Cas9 protein is used to identify the location of a target sequence.

[0297] In some embodiments, a Cas9 protein may form a component of an inducible system. The inducible nature of the system allows for spatiotemporal control of gene editing or gene expression using a form of energy. The form of energy can include, but is not limited to: electromagnetic radiation, sound energy, chemical energy, and thermal energy. Non-limiting examples of inducible system include: tetracycline inducible promoters (Tet-On or Tet-Off), small molecule two-hybrid transcription activations systems (FKBP, ABA, etc), or light inducible systems (Phytochrome, LOV domains, or cryptochrome). In some embodiments, the Cas9 protein is a part of a Light Inducible Transcriptional Effector (LITE) to direct changes in transcriptional activity in a sequence-specific manner. The components of a light may include a Cas9 protein, a light-responsive cytochrome heterodimer (e.g., from Arabidopsis thaliana), and a transcriptional activation/repression domain. Further examples of inducible DNA binding proteins and methods for their use are provided in International Application Publication Nos. WO 2014/018423 and WO 2014/093635; U.S. Pat. Nos. 8,889,418 and 8,895,308; and U.S. Patent Publication Nos. 2014/0186919, 2014/0242700, 2014/0273234, and 2014/0335620; each of which is hereby incorporated by reference in its entirety.

### Methods for Site-Specific Modifications

[0298] In some embodiments, the present disclosure presents a method for providing site-specific modification of a target sequence in a eukaryotic cell, the method comprising: (1) introducing into the cell: (a) a Cas9 effector protein capable of generating cohesive ends (stiCas9), and (b) a guide polynucleotide that forms a complex with the stiCas9 and comprises a guide sequence, wherein the guide sequence is capable of hybridizing with the target sequence in the eukaryotic cell but does not hybridize to a sequence in a bacterial cell, wherein the complex does not occur in nature; (2) generating cohesive ends in the target sequence with the Cas9 effector protein and the guide polynucleotide; and (3) ligating: (a) the cohesive ends together, or (b) a polynucleotide sequence of interest (SoI) to the cohesive ends, thereby modifying the target sequence.

[0299] A “modification” of a target sequence encompasses single-nucleotide substitutions, multiple-nucleotide substitutions, insertions (i.e., knock-in) and deletions (i.e., knock-out) of a nucleic acid, frameshift mutations, and other nucleic acid modifications.

[0300] In some embodiments, the modification is a deletion of at least part of the target sequence. A target sequence can be cleaved at two different sites and generate complementary cohesive ends, and the complementary cohesive ends can be re-ligated, thereby removing the sequence portion in between the two sites.

[0301] In some embodiments, the modification is a mutation of the target sequence. Site-specific mutagenesis in eukaryotic cells is achieved by the use of site-specific nucleases that promote homologous recombination of an exogenous polynucleotide template (also called a “donor polynucleotide” or “donor vector”) containing a mutation of interest. In some embodiments, a sequence of interest (SoI) comprises a mutation of interest.

[0302] In some embodiments, the modification is inserting a sequence of interest (SoI) into the target sequence. The SoI can be introduced as an exogenous polynucleotide template. In some embodiments, the exogenous polynucleotide template comprises cohesive ends. In some embodiments, the exogenous polynucleotide template comprises cohesive ends complementary to cohesive ends in the target sequence.

[0303] The exogenous polynucleotide template can be of any suitable length, such as about or at least about 10, 15, 20, 25, 50, 75, 100, 150, 200, 250, 500 or 1000 or more nucleotides in length. In some embodiments, the exogenous polynucleotide template is complementary to a portion of a polynucleotide comprising the target sequence. When optimally aligned, the exogenous polynucleotide template overlaps with one or more nucleotides of a target sequence (e.g., about or at least about 1, 5, 10, 15, 20, 25, 30, 35, 40, 45, 50, 60, 70, 80, 90, or 100 or more nucleotides). In some embodiments, when the exogenous polynucleotide template and a polynucleotide comprising the target sequence are optimally aligned, the nearest nucleotide of the exogenous polynucleotide template is within about 1, 5, 10, 15, 20, 25, 50, 75, 100, 200, 300, 400, 500, 100, 1500, 2000, 2500, 5000, 10000 or more nucleotides from the target sequence.

[0304] In some embodiments, the exogenous polynucleotide is DNA, such as, e.g., a DNA plasmid, a bacterial artificial chromosome (BAC), a yeast artificial chromosome (YAC), a viral vector, a linear piece of single-stranded or double-stranded DNA, an oligonucleotide, a PCR fragment, a naked nucleic acid, or a nucleic acid complexed with a delivery vehicle such as a liposome.

[0305] In some embodiments, the exogenous polynucleotide is inserted into the target sequence using an endogenous DNA repair pathway of the cell. Endogenous DNA repair pathways include the Non-Homologous End Joining (NHEJ) pathway, Microhomology-Mediated End Joining (MMEJ) pathway, and the Homology-Directed Repair (HDR) pathway. NHEJ, MMEJ, and HDR pathways repair double-stranded DNA breaks. In NHEJ, a homologous template is not required for repairing breaks in the DNA. NHEJ repair can be error-prone, although errors are decreased when the DNA break comprises compatible overhangs. NHEJ and MMEJ are mechanistically distinct DNA repair pathways with different subsets of DNA repair enzymes involved in each of them. Unlike NHEJ, which can be precise as well as error-prone, MMEJ is always error-prone and results in both deletion and insertions at the site under repair. MMEI-associated deletions are due to the micro-homologies (2-10 base pairs) at both sides of a double-strand break. In contrast, HDR requires a homologous template to direct repair, but HDR repairs are typically high-fidelity and less error-prone. In some embodiments, the error-prone nature of NHEJ and MMEJ repairs is exploited to introduce non-specific nucleotide substitutions in the target sequence. In some embodiments, stiCas9 cuts the target sequence in a manner that facilitates HDR repair.

[0306] During the repair process, an exogenous polynucleotide template comprising the SoI can be introduced into the target sequence. In some embodiments, an exogenous polynucleotide template comprising the SoI flanked by an upstream sequence and a downstream sequence is introduced into the cell, wherein the upstream and downstream sequences share sequence similarity with either side of the site of integration in the target sequence. In some embodiments, the exogenous polynucleotide comprising the SoI comprises, for example, a mutated gene. In some embodiments, the exogenous polynucleotide comprises a sequence endogenous or exogenous to the cell. In some embodiments, the SoI comprises polynucleotides encoding a protein, or a non-coding sequence such as, e.g., a microRNA. In some embodiments, the SoI is operably linked to a regulatory element. In some embodiments, the SoI is a regulatory element. In some embodiments, the SoI comprises a resistance cassette, e.g., a gene that confers resistance to an antibiotic. In some embodiments, the SoI comprises a mutation of the wild-type target sequence. In some embodiments, the SoI disrupts or corrects the target sequence by creating a frameshift mutation or nucleotide substitution. In some embodiments, the SoI comprises a marker. Introduction of a marker into a target sequence can make it easy to screen for targeted integrations. In some embodiments, the marker is a restriction site, a fluorescent protein, or a selectable marker. In some embodiments, the SoI is introduced as a vector comprising the SoI.

[0307] The upstream and downstream sequences in the exogenous polynucleotide template are selected to promote homologous recombination between the target sequence and the exogenous polynucleotide. The upstream sequence is a nucleic acid sequence that shares sequence similarity with the sequence upstream of the targeted site for integration (i.e., the target sequence). Similarly, the downstream sequence is a nucleic acid sequence that shares sequence similarity with the sequence downstream of the targeted site for integration. Thus, in some embodiments, the exogenous polynucleotide template comprising the SoI is inserted into the target sequence by homologous recombination at the upstream and downstream sequences. In some embodiments, the upstream and downstream sequences in the exogenous polynucleotide template have at least 70%, at least 75%, at least 80%, at least 85%, at least 90%, at least 95%, at least 96%, at least 97%, at least 98%, at least 99%, or 100% sequence identity with the upstream and downstream sequences of the targeted genome sequence, respectively. In some embodiments, the upstream or downstream sequence has about 20 to 2000 base pairs, or about 50 to 1750 base pairs, or about 100 to 1500 base pairs, or about 200 to 1250 base pairs, or about 300 to 1000 base pairs, or about 400 to about 750 base pairs, or about 500 to 600 base pairs. In some embodiments, the upstream or downstream sequence has about 50, about 100, about 250, about 500, about 100, about 1250, about 1500, about 1750, about 2000, about 2250, or about 2500 base pairs.

[0308] In some embodiments, the modification in the target sequence is inactivation of expression of the target sequence in the cell. For example, upon the binding of a CRISPR complex to the target sequence, the target sequence is inactivated such that the sequence is not transcribed, the coded protein is not produced, or the sequence does not function as the wild-type sequence does. For example, a protein or microRNA coding sequence may be inactivated such that the protein is not produced.

[0309] In some embodiments, a regulatory sequence can be inactivated such that it no longer functions as a regulatory sequence. Examples of a regulatory sequence include a promoter, a transcription terminator, an enhancer, and other regulatory elements described herein. The inactivated target sequence may include a deletion mutation (i.e., deletion of one or more nucleotides), an insertion mutation (i.e., insertion of one or more nucleotides), or a nonsense mutation (i.e., substitution of a single nucleotide for another nucleotide such that a stop codon is introduced). In some embodiments, the inactivation of a target sequence results in “knockout” of the target sequence.

[0310] In some embodiments, the stiCas9 and guide polynucleotide form a complex, and the guide polynucleotide hybridizes to the target sequence to be modified. In some embodiments, the stiCas9 generates cohesive ends in the target sequence that is hybridized to the guide polynucleotide.

[0311] In embodiments of the method, the cohesive ends generated by the stiCas9 comprise a single-stranded polynucleotide overhang of 3 to 40 nucleotides. In some embodiments, the cohesive ends generated by the stiCas9 comprise a single-stranded polynucleotide overhang of 4 to 20 nucleotides. In some embodiments, the cohesive ends generated by the stiCas9 comprise a single-stranded polynucleotide overhang of 5 to 15 nucleotides. In some embodiments, the cohesive ends generated by the stiCas9 is a 5′ overhang.

[0312] In embodiments of the method, the stiCas9 is derived from a bacterial species having a Type II-B CRISPR system. As discussed herein, Type II-B Cas9 proteins belong to the TIGR03031 TIGRFAM protein family. Thus, in some embodiments, the stiCas9 of the present disclosure comprises a domain that matches the TIGR03031 protein family with a 1E-5 profile cut-off value. In some embodiments, the stiCas9 of the present disclosure comprises a domain that matches the TIGR03031 protein family with a 1E-10 profile cut-off value. In some embodiments, the stiCas9 of the present disclosure comprises a domain that matches the TIGR03031 protein family with an E-value cut-off of at least 1E-10, at least 1E-9, at least 1E-8, at least 1E-7, at least 1E-6, at least 1E-5, at least 1E-4, at least 1E-3, at least 1E-2, or at least 1E-1.

[0313] In embodiments of the method, the Type II-B Cas9 is derived from any species having a Type II-B CRISPR system. In some embodiments, the Type II-B Cas9 is derived from the following bacterial species: Legionella pneumophila, Francisella novicida, gamma proteobacterium HTCC5015, Parasutterella excrementihominis, Sutterella wadsworthensis, Sulfurospirillum sp. SCADC, Ruminobacter sp. RM87, Burkholderiales bacterium 1_1_47, Bacteroidetes oral taxon 274 str. F0058, Wolinella succinogenes, Burkholderiales bacterium YL45, Ruminobacter amylophilus, Campylobacter sp. P0111, Campylobacter sp. RM9261, Campylobacter lanienae strain RM8001, Camplylobacter lanienae strain P0121, Turicimonas muris, Legionella londiniensis, Salinivibrio sharmensis, Leptospira sp. isolate FW.030, Moritella sp. isolate NORP46, Endozoicomonassp. S-B4-1U, Tamilnaduibacter salinus, Vibrio natriegens, Arcobacter skirrowii, Francisella philomiragia, Francisella hispaniensis, or Parendozoicomonas haliclonae.

[0314] In embodiments of the method, the guide polynucleotide is guide RNA. In some embodiments, the guide polynucleotide comprises at least two nucleotide segments: at least one “DNA-binding segment” or “guide sequence” and at least one “polypeptide-binding segment.” In some embodiments, the DNA-binding segment of the guide polynucleotide hybridizes with a target sequence in a eukaryotic cell, but not a sequence in a bacterial cell. In some embodiments, the polypeptide-binding segment of the guide polynucleotide binds to Cas9. In some embodiments, the polypeptide-binding segment of the guide polynucleotide binds to stiCas9.

[0315] In embodiments of the method, the guide polynucleotide is 10 to 35 nucleotides. In some embodiments, the guide polynucleotide is 15 to 30 nucleotides. In some embodiments, the guide polynucleotide is 20 to 25 nucleotides.

[0316] In embodiments of the method, the stiCas9 and the guide polynucleotide are capable of forming a complex. In some embodiments, a complex is formed when all the components of the complex are present together, i.e., a self-assembling complex. In some embodiments, a complex is formed through chemical interactions between different components of the complex such as, for example, hydrogen-bonding. In some embodiments, a guide polynucleotide forms a complex with a stiCas9 through secondary structure recognition of the guide polynucleotide by the stiCas9. In some embodiments, a stiCas9 protein is inactive, i.e., does not exhibit nuclease activity, until it forms a complex with a guide polynucleotide. Binding of guide RNA induces a conformational change in stiCas9 to convert the stiCas9 from the inactive form to an active, i.e., catalytically active, form. In embodiments of the method, the complex of the stiCas9 and guide polynucleotide does not occur in nature.

[0317] In embodiments of the method, the cohesive ends generated by the stiCas9 are ligated together (i.e., joined together chemically). Ligation can be performed, for example, by DNA ligase such as T4 ligase or DNA ligase IV. In some embodiments, the cohesive ends are ligated together with an error prone ligase that introduces one or more nucleotide substitutions. In some embodiments, a polynucleotide sequence of interest (SoI) is ligated to the cohesive ends. In some embodiments, the SoI comprises a mutation of interest.

[0318] In embodiments of the method, cohesive ends are generated in the SoI complementary to the cohesive ends generated in the target sequence. In some embodiments, cohesive ends in the SoI are generated by a stiCas9. In some embodiments, the SoI is ligated into the cohesive ends using an endogenous DNA repair pathway of the cell. Endogenous DNA repair pathways are described herein.

[0319] In some embodiments, the present disclosure provides a method for providing site-specific modification of a target sequence in a eukaryotic cell, the method comprising: (1) introducing into the cell: (a) a nucleotide sequence encoding a Cas9 effector protein capable of generating cohesive ends (stiCas9), and (b) a guide polynucleotide that forms a complex with the stiCas9 and comprises a guide sequence, wherein the guide sequence is capable of hybridizing with the target sequence in the eukaryotic cell but does not hybridize to a sequence in a bacterial cell, wherein the complex does not occur in nature; (2) generating cohesive ends in the target sequence with the Cas9 effector protein and the guide polynucleotide; and (3) ligating: (a) the cohesive ends together, or (b) a polynucleotide sequence of interest (SoI) to the cohesive ends, thereby modifying the target sequence.

[0320] In embodiments of the method, the stiCas9 is encoded by a nucleotide sequence. In some embodiments, the nucleotide is DNA. In some embodiments, the stiCas9 protein comprises a domain comprising a sequence having at least 70%, at least 75%, at least 80%, at least 85%, at least 90%, at least 95%, at least 96%, at least 97%, at least 98%, at least 99%, or 100% identity with the nucleotide sequence of any of SEQ ID NOs: 10-97 or 192-195.

[0321] In embodiments of the method, the CRISPR-Cas systems of the present disclosure further comprise a tracrRNA. In some embodiments, the guide RNA comprises the crRNA/tracrRNA hybrid. In some embodiments, the tracrRNA component of the guide RNA activates the Cas9 protein. In embodiments of the method, the stiCas9, guide polynucleotide, and tracrRNA are capable of forming a complex. In some embodiments, the complex of the stiCas9, guide polynucleotide, and tracrRNA does not occur in nature.

[0322] In embodiments of the method, the complex comprising stiCas9 and a guide polynucleotide is capable of cleaving at a site within 10 nucleotides of a Protospacer Adjacent Motif (PAM). In some embodiments, the complex comprising stiCas9 and a guide polynucleotide is capable of cleaving at a site within 5 nucleotides of a PAM. In some embodiments, the complex comprising stiCas9 and a guide polynucleotide is capable of cleaving at a site within 3 nucleotides of a PAM. In some embodiments, the PAM is downstream (i.e., 3′ direction) of the target sequence. In some embodiments, the PAM is upstream (i.e., 5′ direction) of the target sequence. In some embodiments, the PAM is located within the target sequence.

[0323] In embodiments of the method, the PAM comprises a 3′ G-rich motif. In some embodiments, the PAM sequence is NGG, wherein N is A, C, T, U, or G. In some embodiments, the PAM sequence is NGA, wherein N is A, C, T, U, or G. In some embodiments, the PAM sequence is YG, wherein Y is a pyrimidine (i.e., C, T, or U). In embodiments of the method, the target sequence is 5′ of a PAM and the PAM comprises a 3′ G-rich motif. In some embodiments, the target sequence is 5′ of a PAM and the PAM sequence is NGG, wherein N is A, C, T, U, or G.

[0324] In embodiments of the method, the eukaryotic cell is an animal or human cell. In some embodiments, the eukaryotic cell is an animal cell. In some embodiments, the eukaryotic cell is a human cell, including human stem cell. In some embodiments, the eukaryotic cell is a plant cell. Examples of various types of eukaryotic cells are provided herein. In embodiments of the method, the stiCas9 and guide polynucleotide are introduced into the eukaryotic cell via a delivery particle. In embodiments of the method, the stiCas9 and guide polynucleotide are introduced into the eukaryotic cell via a vesicle. In embodiments of the method, the stiCas9 and guide polynucleotide are introduced into the eukaryotic cell via a vector. In embodiments of the method, the stiCas9 and the guide polynucleotide are introduced into the eukaryotic cell via a viral vector. In embodiments of the method, the polynucleotides encoding components of the complex comprising a stiCas9 and guide polynucleotide are introduced on one or more vectors. Examples of vectors and methods of vector delivery into cells (e.g., transfection) are provided herein.

[0325] In some embodiments, the methods of the present disclosure further comprise introducing into a eukaryotic cell an exonuclease to remove overhangs generated from the stiCas9. In some embodiments, the exonuclease is a 5′ to 3′ exonuclease. In some embodiments, the exonuclease is a 3′ to 5′ exonuclease. In some embodiments, the exonuclease is added prior to the ligation step of the method. In some embodiments, the exonuclease is added instead of the ligation step of the method. Non-limiting examples of 5′ to 3′ exonucleases include: Lambda Exonuclease, RecJ, Exonuclease V, Exonuclease VIII, T5 Exonuclease, T7 Exonuclease, Artemis, and Cas4. Non-limiting examples of 3′ to 5′ exonucleases include: TREX1, TREX2, Werner syndrome (WRN) protein, p53, MRE11, RAD1, RAD9, APE1, and VDJP protein. In some embodiments, the exonuclease is Cas4, Artemis, or TREX2.

[0326] Introduction of Cas4, Artemis, TREX2, or other similar exonucleases allows the end processing of cohesive ends before ligation occurs, thereby decreasing the chance of precise ligations and thus increasing the efficiency of mutagenesis, competing with endogenous DNA repair enzymes to bias the repair towards one of the other repair pathways (e.g., NHEJ or MMEJ), and modulating the mutation patterns. For example, Cas4, Artemis, or TREX2 may increase the efficiency of mutagenesis by competing with endogenous end processing enzymes, thus promoting error-prone repairs. Cas4, Artemis, or TREX2 may also facilitate HDR repair by elongating the single-strand overhangs. A further role for Cas4, Artemis, or TREX2 may, for example, involve changing mutation patterns towards more desirable indels.

### Methods for Site-Specific Gene Insertions (ObLiGaRe 2.0)

[0327] In some embodiments, the present disclosure provides a method of introducing a sequence of interest (SoI) into a chromosome in a cell based on a derivation of the ObLiGaRe method described in U.S. Pat. No. 9,567,608. ObLiGaRe (Obligated Ligation-Gated Recombination) reflects the etymologic meaning of the Latin verb obligare (to ligate head to head). It is broadly applicable in different cell lines and provides an additional approach for genetic engineering. Whereas U.S. Pat. No. 9,567,608 employed zinc finger nucleases to target and cleave the target sequence, the disclosure herein provides for the use of a first Cas9-endonuclease dimer, e.g., Cas9-FokI, and a second Cas9-endonuclease dimer. The methods for site-specific gene insertions described herein are informally referred to “ObLiGaRe 2.0” as a shorthand, to distinguish it from the ObLiGaRe method described in U.S. Pat. No. 9,567,608.

[0328] In some embodiments, the present disclosure provides a method of introducing a sequence of interest (SoI) into a chromosome in a cell, wherein the chromosome comprises a target sequence (TSC) comprising region 1 and region 2, the method comprising introducing into the cell: (a) a vector comprising a target sequence (TSV), the TSV comprising region 2 and region 1 and the SoI; (b) a first Cas9-endonuclease dimer capable of generating cohesive ends in the TSC, wherein a first monomer of the first Cas9-endonuclease dimer cleaves at region 1 and a second monomer of the first Cas9-endonuclease dimer cleaves at region 2 of the TSC; and (c) a second Cas9-endonuclease dimer capable of generating cohesive ends in the TSV, wherein a first monomer of the second Cas9-endonuclease dimer cleaves at region 2 and a second monomer of the second Cas9-endonuclease dimer cleaves at region 1 of the TSV, and wherein introduction of the vector of (a), the first Cas9-endonuclease dimer of (b) and the second Cas9-endonuclease dimer of (c) results in insertion of the SoI into the chromosome of the cell.

[0329] In some embodiments, the disclosure is directed to a method of introducing a sequence of interest (SoI) into a chromosome in a cell, wherein the chromosome comprises a target sequence (TSC) comprising region 1 and region 2, the method comprising introducing into the cell: (a) a vector comprising a target sequence (TSV), the TSV comprising region 2 and region 1 and the SoI, wherein the vector comprises cohesive ends; and (b) a first Cas9-endonuclease dimer capable of generating cohesive ends in the TSC, wherein a first monomer of the first Cas9-endonuclease dimer cleaves at region 1 and a second monomer of the first Cas9-endonuclease dimer cleaves at region 2 of the TSC; wherein introduction of the vector of (a) and the first Cas9-endonuclease dimer of (b) results in insertion of the SoI into the chromosome of the cell.

[0330] The method of the present disclosure provides efficient and precise gene targeting without homology in the vector (or “donor plasmid”). The method of the present disclosure provides a strategy of site-specific gene insertion using the Non-Homologous End Joining (NHEJ) or Microhomology-Mediated End Joining (MMEJ) pathways. The design and location of the cleavage sites (i.e., region 1 and region 2) in the vector is sufficient to achieve precise end joining of the vector in the cleavage sites (i.e., region 1 and region 2) in the genomic site, i.e., the target sequence in the chromosome of the cell (TSC).

[0331] In some embodiments, the TSV is a circular vector, i.e., a plasmid. In some embodiments, the TSV is a linearized vector or linear DNA, such as, for example, a PCR product, or an annealed oligonucleotide duplex with complementary ends to the TSC after cleavage. In some embodiments, the TSV comprises cohesive ends. In some embodiments, the cohesive ends in the TSV are generated by a Cas9-endonuclease dimer. In some embodiments, the cohesive ends in the TSV are generated prior to introduction of the TSV into a cell. In some embodiments, the cohesive ends in the TSV are generated after introduction of the TSV into a cell.

[0332] In some embodiments, the target sequence on the chromosome (TSC) comprises, in a 5′ to 3′ manner, region 1 and region 2. As used herein, the directionality of a sequence (e.g., 5′ to 3′) refers to the direction when reading the “coding” strand or “sense” strand of a double-stranded DNA sequence (typically presented as the top strand of a double-stranded DNA sequence).

[0333] FIG. 12 represents an embodiment of the present disclosure. In FIG. 12, the TSC is represented by the sequence in the “Genome” box (left) and comprises: Region 1 and Region 2 (a portion of which is overlapping with Region 1) on the “coding” strand (shown as the top strand).

[0334] As shown in the “Genome” box of FIG. 12, upstream (i.e., 5′ with respect to the coding strand) of Region 1 and on the “non-coding” or “anti-sense” DNA strand (shown as the bottom strand), there is a first PAM sequence. The non-coding strand comprises a region that hybridizes to a first guide polynucleotide (“gRNA1”). gRNA1 hybridizes to a sequence upstream (i.e., 5′ with respect to the non-coding strand) of the first PAM sequence. This gRNA1 hybridization sequence includes a portion of Region 1 and additionally several nucleotides outside of Region 1. As indicated by the direction of the arrows, gRNA1 hybridizes with the non-coding strand of the target sequence.

[0335] As shown in the “Genome” box of FIG. 12, downstream (i.e., 3′ with respect to the coding strand) of Region 2 and on the coding strand, there is a second PAM sequence. The coding strand comprises a region that hybridizes to a second guide polynucleotide (“gRNA2”). gRNA2 hybridizes to a sequence upstream (i.e., 5′ with respect to the coding strand) of the second PAM sequence. This gRNA2 hybridization sequence includes a portion of Region 2 and additionally several nucleotides outside of Region 2. As indicated by the direction of the arrows, gRNA2 hybridizes with the coding strand of the target sequence.

[0336] In some embodiments, the target sequence on the vector (TSV) comprises, in a 5′ to 3′ manner, region 2, immediately followed by region 1, and the SoI. FIG. 12 represents an embodiment of the present disclosure. In FIG. 12, the TSV is represented by the sequence in the “Vector” box (right) and comprises: Region 2, followed by Region 1 (without any overlap between the two regions) on the “coding” strand.

[0337] As shown in the “Vector” box of FIG. 12, upstream (i.e., 5′ with respect to the coding strand) of Region 2 and on the “non-coding,” there is a third PAM sequence. The non-coding strand comprises a region that hybridizes to a third guide polynucleotide (“gRNA3”). gRNA3 hybridizes to a sequence upstream (i.e., 5′ with respect to the non-coding strand) of the third PAM sequence. This gRNA3 hybridization sequence includes a portion of Region 2 and additionally several nucleotides outside of Region 2. As indicated by the direction of the arrows, gRNA3 hybridizes with the non-coding strand of the target sequence.

[0338] As shown in the “Vector” box of FIG. 12, downstream (i.e., 3′ with respect to the coding strand) of Region 1 and on the coding strand, there is a fourth PAM sequence. The coding strand comprises a region that hybridizes to a fourth guide polynucleotide (“gRNA4”). gRNA4 hybridizes to a sequence upstream (i.e., 5′ with respect to the coding strand) of the fourth PAM sequence. This gRNA4 hybridization sequence includes a portion of Region 1 and additionally several nucleotides outside of Region 1. As indicated by the direction of the arrows, gRNA4 hybridizes with the coding strand of the target sequence.

[0339] FIG. 14 represents another embodiment of the present disclosure. FIG. 14 is similar to FIG. 14, except that there is a gap of several nucleotides between Region 1 and Region 2 on the TSC, and that there is a gap of several nucleotides between Region 2 and Region 1 on the TSV. However, the arrangement of the regions relative to one another, and the directionality of the guide polynucleotides are the same in FIG. 14 and FIG. 12.

[0340] Thus, in some embodiments, the target sequence on the chromosome (i.e., the TSC) comprises region 1 and region 2, wherein a portion of region 1 overlaps with a portion of region 2. In other embodiments, the TSC comprises region 1 and region 2, wherein region 1 and region 2 are separated by one or more nucleotides. In some embodiments, region 1 and region 2 overlap by 1, 2, 3, 4, 5, 6, 7, 8, 9, 10 or more nucleotides. In some embodiments, region 1 and region 2 are separated by 1, 2, 3, 4, 5, 6, 7, 8, 9, 10 or more nucleotides.

[0341] In some embodiments, the target sequence on the vector (i.e., the TSV) comprises region 2 and region 1, wherein region 2 immediately precedes region 1 without any nucleotides in between. In other embodiments, the TSV comprises region 2 and region 1, wherein region 2 and region 1 are separated by 1 or more nucleotides. In some embodiments, region 2 and region 1 are separated by 1, 2, 3, 4, 5, 6, 7, 8, 9, 10 or more nucleotides.

[0342] In embodiments of the method, a Cas9-endonuclease dimer generates cohesive ends in the target sequence. As described herein, Cas9 proteins generate site-specific breaks in a nucleic acid. In some embodiments, Cas9 proteins generate site-specific double-stranded breaks in DNA. The ability of Cas9 to target a specific sequence in a nucleic acid (i.e., site specificity) is achieved by the Cas9 complexing with a guide polynucleotide, e.g., guide RNA, that hybridizes with the specified sequence. Thus, a complex comprising a Cas9 and guide polynucleotide has at least two distinct functions: (1) specific targeting of a nucleic acid sequence, and (2) nuclease activity generating a break at or near the targeted nucleic acid sequence. In some embodiments, a Cas9-guide polynucleotide complex is modified such that it performs only one of the two functions. In some embodiments, a Cas9 is modified to remove nuclease activity, but retains the ability to complex with a guide polynucleotide such that the Cas9 can still target a specific nucleic acid sequence.

[0343] As described herein, wild-type Cas9 is a monomeric protein comprising a nucleic acid-binding domain (which interacts with a guide polynucleotide) and a cleavage domain (which cleaves the target nucleic acid). In certain instances, it is advantageous to use a dimeric nuclease, i.e., a nuclease which is not active until both monomers of the dimer are present at the target sequence, in order to achieve higher targeting specificity. Binding domains and cleavage domains of naturally-occurring nucleases (such as, e.g., Cas9), as well as modular binding domains and cleavage domains that can be fused to create nucleases binding specific target sites, are well known to those of skill in the art. For example, the binding domain of RNA-programmable nucleases (e.g., Cas9), or a Cas9 protein having an inactive DNA cleavage domain, can be used as a binding domain (e.g., that binds a gRNA to direct binding to a target site) to specifically bind a desired target site, and fused or conjugated to a cleavage domain, for example, the cleavage domain of the endonuclease FokI, to create an engineered nuclease cleaving the target site. Cas9-FokI fusion proteins are further described in, e.g., U.S. Patent Publication No. 2015/0071899 and Guilinger et al., “Fusion of catalytically inactive Cas9 to FokI nuclease improves the specificity of genome modification,” Nature Biotechnology 32: 577-582 (2014), each of which is incorporated by reference herein in its entirety.

[0344] In some embodiments, the engineered nuclease recognizes a palindromic, double-stranded target site, for example, a double-stranded DNA target site. The target sites of many naturally-occurring nucleases such as, for example, naturally-occurring DNA restriction nucleases, are well-known to those of skill in the art. In some embodiments, a DNA nuclease such as, e.g., EcoRI, HindIII, or BamHI, recognizes a palindromic, double-stranded DNA target site of 4 to 10 base pairs in length and cuts each of the two DNA strands at a specific position within the target site. In some embodiments, an endonuclease cuts a double-stranded nucleic acid target site symmetrically, i.e., cutting both strands at the same position so that the ends comprise base-paired nucleotides, also referred to herein as blunt ends. In some embodiments, an endonuclease cuts a double-stranded nucleic acid target site asymmetrically, i.e., cutting each strand at a different position so that the ends comprise unpaired nucleotides, i.e., cohesive ends or overhangs. In some embodiments, the overhangs are 5′-overhangs, i.e., the unpaired nucleotides form the 5′ end of the DNA strand. In some embodiments, the overhangs are 3′-overhangs, i.e., the unpaired nucleotides form the 3′ end of the DNA strand. Overhangs can “stick” to (i.e., joined with) other double-stranded DNA molecule ends comprising complementary unpaired nucleotides.

[0345] In some embodiments, fusion proteins are provided comprising two domains: (i) an RNA-programmable nuclease (e.g., Cas9 protein, or fragment thereof) domain fused or linked to (ii) a nuclease domain. For example, in some embodiments, the Cas9 protein (e.g., the Cas9 domain of the fusion protein) comprises a nuclease-inactivated Cas9 (e.g., a Cas9 lacking DNA cleavage activity; “dCas9”) that retains RNA (gRNA) binding activity and is thus able to bind a target site complementary to a gRNA. In some embodiments, the nuclease fused to the nuclease-inactivated Cas9 domain is any nuclease requiring dimerization (e.g., the coming together of two monomers of the nuclease) in order to cleave a target nucleic acid (e.g., DNA). In some embodiments, the nuclease fused to the nuclease-inactivated Cas9 is a monomer of the FokI DNA cleavage domain, thereby producing the Cas9 variant referred to as Cas9-FokI. The FokI DNA cleavage domain is known, and in embodiments corresponds to amino acids 388-583 of FokI (NCBI accession number J04623). In some embodiments, the FokI DNA cleavage domain corresponds to amino acids 300-583, 320-583, 340-583, or 360-583 of FokI. (See also Wah et al., “Structure of FokI has implications for DNA cleavage,” Proceedings of the National Academy of Sciences USA 95(18): 10564-9 (1996); Li et al., “TAL nucleases (TALNs): hybrid proteins composed of TAL effectors and FokI DNA-cleavage domain,” Nucleic Acids Research 39(1): 359-72 (2011); Kim et al., “Hybrid restriction enzymes: zinc finger fusions to FokI cleavage domain,” Proceedings of the National Academy of Sciences USA 93: 1156-1160 (1996); each of which is herein incorporated by reference in its entirety.)

[0346] In some embodiments, a dimer of the Cas9-endonuclease fusion protein is provided, e.g., dimers of Cas9-FokI. For example, in some embodiments, the Cas9-FokI fusion protein forms a dimer with itself to mediate cleavage of the target nucleic acid. In some embodiments, the Cas9-endonuclease fusion proteins, or dimers thereof, are associated with one or more gRNAs. In some embodiments, because the dimer contains two fusion proteins, each having a Cas9 domain having gRNA binding activity, a target nucleic acid is targeted using two distinct gRNA sequences that complement two distinct regions of the nucleic acid target. See, e.g., FIGS. 10 and 11. Thus, in some embodiments, cleavage of the target nucleic acid does not occur until both fusion proteins bind the target nucleic acid (e.g., as specified by the gRNA:target nucleic acid base pairing), and the nuclease domains dimerize (e.g., the FokI DNA cleavage domains; as a result of their proximity based on the binding of the Cas9:gRNA domains of the fusion proteins) and cleave the target nucleic acid, e.g., in the region between the bound Cas9 fusion proteins. This is exemplified by the schematics shown in FIGS. 10 and 11. This approach represents a notable improvement over wild type Cas9 and other Cas9 variants, such as the nickases (Ran et al., “Double Nicking by RNA-Guided CRISPR Cas9 for Enhanced Genome Editing Specificity,” Cell 154: 1380-1389 (2013); Mali et al., “CAS9 transcriptional activators for target specificity screening and paired nickases for cooperative genome engineering,” Nature Biotechnology 31: 833-838 (2013)), which do not require the dimerization of nuclease domains to cleave a nucleic acid. These nickase variants can induce cleaving, or nicking upon binding of a single nickase to a nucleic acid, which can occur at on- and off-target sites, and nicking is known to induce mutagenesis. As the variants provided herein require the binding of two Cas9 variants in proximity to one another to induce target nucleic acid cleavage, the chances of inducing off-target cleavage is reduced. In some embodiments, a Cas9 variant fused to a nuclease domain (e.g., Cas9-FokI) has an on-target:off-target modification ratio that is at least 2-fold, at least 5-fold, at least 10-fold, at least 20-fold, at least 30-fold, at least 40-fold, at least 50-fold, at least 60-fold, at least 70-fold, at least 80-fold, at least 90-fold, at least 100-fold, at least 110-fold, at least 120-fold, at least 130-fold, at least 140-fold, at least 150-fold, at least 175-fold, at least 200-fold, at least 250-fold, or more higher than the on-target:off-target modification ratio of a wild type Cas9 or other Cas9 variant (e.g., nickase). In some embodiments, a Cas9 variant fused to a nuclease domain (e.g., Cas9-FokI) has an on-target:off-target modification ratio that is between about 60- to 180-fold, between about 80- to 160-fold, between about 100- to 150-fold, or between about 120- to 140-fold higher than the on-target:off-target modification ratio of a wild type Cas9 or other Cas9 variant. Methods for determining on-target:off-target modification ratios are known. In some embodiments, the on-target:off-target modification ratios are determined by measuring the number or amount of modifications of known Cas9 off-target sites in certain genes. For example, the Cas9 off-target sites of the CLTA, EMX, and VEGF genes are known, and modifications at these sites can be measured and compared between test proteins and controls. The target site and its corresponding known off-target sites are amplified from genomic DNA isolated from cells (e.g., HEK293) treated with a particular Cas9 protein or variant. The modifications are then analyzed by high-throughput sequencing. Sequences containing insertions or deletions of two or more base pairs in potential genomic off-target sites and present in significantly greater numbers (p value <0.005, Fisher's exact test) in the target gRNA-treated samples versus the control gRNA-treated samples are considered Cas9 nuclease-induced genome modifications.

[0347] In some embodiments, the method of the present disclosure provides a dimer of Cas9-endonuclease comprising a first Cas9-endonuclease monomer and a second Cas9-endonuclease monomer. In embodiments of the method, the endonucleases of the Cas9-endonucleases are Type IIS endonucleases. In some embodiments, the endonuclease of the first monomer in the first Cas9-endonuclease dimer is a Type IIS endonuclease. In some embodiments, the endonuclease of the second monomer in the first Cas9-endonuclease dimer is a Type IIS endonuclease. In some embodiments, the endonuclease of the first monomer and the second monomer in the first Cas9-endonuclease dimer are Type IIS endonucleases. In some embodiments, the endonuclease of the first monomer in the second Cas9-endonuclease dimer is a Type IIS endonuclease. In some embodiments, the endonuclease of the second monomer in the second Cas9-endonuclease dimer is a Type IIS endonuclease. In some embodiments, the endonuclease of the first monomer and the second monomer in the second Cas9-endonuclease dimer are Type IIS endonucleases. In some embodiments, the endonucleases in the first Cas9-endonuclease dimer and the second Cas9-endonuclease dimer are Type IIS endonucleases.

[0348] Endonucleases, or restriction enzymes, are traditionally classified into four types on the basis of subunit composition, cleavage position, sequence specificity, and cofactor requirements. However, amino acid sequencing has uncovered extraordinary variety among restriction enzymes and revealed that at the molecular level, there are many more than four different types.

[0349] “Type IIS” endonucleases are those like FokI and AlwI that cleave outside of their recognition sequence to one side. Type IIS restriction enzymes are intermediate in size, 400-650 amino acids in length, and they recognize sequences that are continuous and asymmetric. They comprise two distinct domains, one for DNA binding, the other for DNA cleavage. They are thought to bind to DNA as monomers for the most part, but to cleave DNA cooperatively, through dimerization of the cleavage domains of adjacent enzyme molecules. For this reason, some Type IIS enzymes are much more active on DNA molecules that contain multiple recognition sites. Non-limiting examples of Type IIS endonucleases include: AcuI, AlwI, BaeI, BbsI, BbvI, BccI, BceAI, BcgI, BciVI, BcoDI, BfuAI, BmrI, BpmI, BpuEI, BsaI, BsaXI, BseRI, BsgI, BsmAI, BsmBI, BsmFI, BsmI, BspCNI, BspMI, BspQI, BsrDI, BsrI, BtgZI, BtsCI, BtsI, CspCI, EarI, EciI, FauI, FokI, HgaI, HphI, HpyAV, MboII, MlyI, MmeI, MnlI, NmeAIII, PleI, SapI, and SfaNI. In some embodiments, the endonuclease in the first Cas9-endonuclease dimer and the second Cas9-endonuclease dimer are independently selected from the group consisting of: BbvI, BgcI, BfuAI, BmpI, BspMI, CspCI, FokI, MboII, MmeI, NmeAIII, and PleI. In some embodiments, the endonuclease in the first Cas9-endonuclease dimer and the second Cas9-endonuclease dimer are FokI. DNA cleavage by FokI only occurs upon dimerization of two FokI monomers. FokI cleavage of DNA generates cohesive ends with a 4 base-pair overhang.

[0350] Endonucleases in the Cas9-endonuclease fusion proteins can also be engineered FokI nucleases, e.g., engineered FokI dimers. In some embodiments, the engineered FokI dimers are obligatory heterodimers, i.e., two non-identical monomers are required to form a functional (catalytically active) dimer.

[0351] In some embodiments, the first and second Cas9-endonuclease dimers are the same. In some embodiments, the first and second Cas9-endonuclease dimers are different.

[0352] In some embodiments, the present method provides that the first, second, or both Cas9-endonuclease dimers comprise a modified Cas9. In some embodiments, the modified Cas9 is a catalytically inactive Cas9 (“deadCas9”). In some embodiments, the first, second, or both Cas9-endonuclease dimers comprise a catalytically inactive Cas9. Catalytically inactive Cas9 are incapable of cleaving DNA (i.e., the cleavage domain of Cas9 is inactivated); however, they retain the ability to target a nucleic acid sequence by forming a complex with a guide polynucleotide (e.g., guide RNA). Catalytically inactive Cas9 have been described in the art, e.g., by Jinek et al. (2012) and Qi et al., “Repurposing CRISPR as an RNA-guided platform for sequence-specific control of gene expression,” Cell 152(5): 1173-1183 (2013). In some embodiments, catalytically inactive Cas9 comprises a double amino-acid substitution relative to wild-type Cas9. In some embodiments, the Cas9-endonuclease dimer comprises a double amino-acid substitution relative to wild-type Cas9. In some embodiments, the double amino-acid substitution is D10A and H840A. In some embodiments, the endonuclease in the first, second, or both Cas9-endonuclease dimers is FokI and the Cas9 in the first, second, or both Cas9-endonuclease dimers is a catalytically inactive Cas9 (“deadCas9-FokI”). In some embodiments, the endonuclease in the first, second, or both Cas9-endonuclease dimers is FokI and the Cas9 in the first, second, or both Cas9-endonuclease dimers comprises the D10A/H840A double amino-acid substitution.

[0353] In some embodiments, the modified Cas9 is a Cas9 having nickase activity (“Cas9 nickase” or “Cas9n”). In some embodiments, the first, second, or both Cas9-endonuclease dimers comprise a Cas9 having nickase activity. Cas9 nickases are capable of cleaving only one strand of double-stranded DNA (i.e., “nicking” the DNA). Cas9 nickases are described in, e.g., Cho et al., “Analysis of off-target effects of CRISPR/Cas-derived RNA-guided endonucleases and nickases,” Genome Research 24: 132-141 (2013), Ran et al. (Cell 2013), and Mali et al. (Nature Biotechnology 2013). In some embodiments, Cas9 nickases comprise a single amino-acid substitution relative to wild-type Cas9. In some embodiments, the Cas9-endonuclease dimer comprises a single amino-acid substitution relative to wild-type Cas9. In some embodiments, the single amino-acid substitution is D10A (“Cas9n^{(D10A)}”). In some embodiments, the single amino-acid substitution is H840A (“Cas9n^{(H840A)}”). In some embodiments, the endonuclease in the first, second, or both Cas9-endonuclease dimers is FokI and the Cas9 in the first, second, or both Cas9-endonuclease dimers is a Cas9 nickase. In some embodiments, the endonuclease in the first, second, or both Cas9-endonuclease dimers is FokI and the Cas9 in the first, second, or both Cas9-endonuclease dimers comprises the D10A single amino-acid substitution (“Cas9n^{(D10A)}-FokI”). In some embodiments, the endonuclease in the first, second, or both Cas9-endonuclease dimers is FokI and the Cas9 in the first, second, or both Cas9-endonuclease dimers comprises the H8410A single amino-acid substitution (“Cas9n^{(H840A)}-FokI”).

[0354] In some embodiments, the wild-type Cas9 is derived from Streptococcus pyogenes, Staphylococcus aureus, Staphylococcus pseudintermedius, Planococcus antarcticus, Streptococcus sanguinis, Streptococcus thermophilus, Streptococcus mutans, Coribacterium glomerans, Lactobacillus farciminis, Catenibacterium mitsuokai, Lactobacillus rhamnosus, Bifidobacterium bifidum, Oenococcus kitahara, Fructobacillus fructosus, Finegoldia magna, Veillonella atyipca, Solobacterium moorei, Acidaminococcus sp. D21, Eubacterium yurri, Coprococcus catus, Fusobacterium nucleatum, Filifactor alocis, Peptoniphilus duerdenii, or Treponema denticola.

[0355] In some embodiments, the cohesive ends generated by the Cas9-endonuclease comprise a 5′ overhang. In some embodiments, the cohesive ends generated by the Cas9-endonuclease comprise a 3′ overhang. In some embodiments, the first, second, or both Cas9-endonuclease dimers generate cohesive ends comprising a single-stranded polynucleotide of 3 to 40 nucleotides. In some embodiments, the first, second, or both Cas9-endonuclease dimers generate cohesive ends comprising a single-stranded polynucleotide of 4 to 30 nucleotides. In some embodiments, the first, second, or both Cas9-endonuclease dimers generate cohesive ends comprising a single-stranded polynucleotide of 5 to 20 nucleotides. In some embodiments, the first, second, or both Cas9-endonuclease dimers generate cohesive ends comprising a single-stranded polynucleotide of about 5 nucleotides, about 10 nucleotides, about 15 nucleotides, about 20 nucleotides, about 25 nucleotides, or about 30 nucleotides. In some embodiments, a deadCas9-FokI dimer generates cohesive ends comprising a 4-nucleotide 5′ overhang. In some embodiments, a Cas9n^{(D10A)}-FokI dimer generates cohesive ends comprising a 27-nucleotide 5′ overhang. In some embodiments, a Cas9^{(H840A)}-FokI dimer generates cohesive ends comprising a 23-nucleotide 3′ -overhang.

[0356] In embodiments of the method, the sequence of interest (SoI) is comprised by a donor plasmid. The donor plasmid can be of any suitable length, such as about or at least about 10, 15, 20, 25, 50, 75, 100, 150, 200, 250, 500 or 1000 or more nucleotides in length. In some embodiments, the donor plasmid is complementary to a portion of the chromosome comprising the TSC. When optimally aligned, the donor plasmid template overlaps with one or more nucleotides of TSC (e.g., about or at least about 1, 5, 10, 15, 20, 25, 30, 35, 40, 45, 50, 60, 70, 80, 90, or 100 or more nucleotides). In some embodiments, when the donor plasmid and a chromosome comprising the TSC are optimally aligned, the nearest nucleotide of the donor plasmid is within about 1, 5, 10, 15, 20, 25, 50, 75, 100, 200, 300, 400, 500, 100, 1500, 2000, 2500, 5000, 10000 or more nucleotides from the TSC.

[0357] In some embodiments, the SoI is DNA, such as, e.g., a DNA plasmid, a bacterial artificial chromosome (BAC), a yeast artificial chromosome (YAC), a viral vector, a linear piece of DNA, a PCR fragment, a naked nucleic acid, or a nucleic acid complexed with a delivery vehicle such as a liposome.

[0358] In some embodiments, the SoI is inserted into the TSC using an endogenous DNA repair pathway of the cell. In some embodiments, the SoI is inserted into the TSC using components of the Non-Homologous End Joining (NHEJ) repair pathway. During the repair process, a donor plasmid comprising the SoI can be introduced into the TSC.

[0359] In some embodiments, a donor plasmid comprising the SoI flanked by an upstream sequence and a downstream sequence is introduced into the cell, wherein the upstream and downstream sequences share sequence similarity with either side of the site of integration in the TSC. In some embodiments, the exogenous polynucleotide comprising the SoI comprises, for example, a mutated gene. In some embodiments, the exogenous polynucleotide comprises a sequence endogenous or exogenous to the cell. In some embodiments, the SoI comprises polynucleotides encoding a protein, or a non-coding sequence such as, e.g., a microRNA. In some embodiments, the SoI is operably linked to a regulatory element. In some embodiments, the SoI is a regulatory element. In some embodiments, the SoI comprises a resistance cassette, e.g., a gene that confers resistance to an antibiotic. In some embodiments, the SoI comprises a mutation of the wild-type target sequence. In some embodiments, the SoI disrupts the target sequence by creating a frameshift mutation or nucleotide substitution. In some embodiments, the SoI comprises a marker. Introduction of a marker into a target sequence can make it easy to screen for targeted integrations. In some embodiments, the marker is a restriction site, a fluorescent protein, or a selectable marker. In some embodiments, the SoI is introduced as a vector comprising the SoI.

[0360] The upstream and downstream sequences in the exogenous polynucleotide template are selected to promote homologous recombination between the target sequence and the exogenous polynucleotide. The upstream sequence is a nucleic acid sequence that shares sequence similarity with the sequence upstream of the targeted site for integration (i.e., the target sequence). Similarly, the downstream sequence is a nucleic acid sequence that shares sequence similarity with the sequence downstream of the targeted site for integration. Thus, in some embodiments, the exogenous polynucleotide template comprising the SoI is inserted into the target sequence by homologous recombination at the upstream and downstream sequences. In some embodiments, the upstream and downstream sequences in the exogenous polynucleotide template has at least 70%, at least 75%, at least 80%, at least 85%, at least 90%, at least 95%, at least 96%, at least 97%, at least 98%, at least 99%, or 100% sequence identity with the upstream and downstream sequences in targeted genome sequence, respectively. In some embodiments, the upstream or downstream sequence has about 20 to 2000 base pairs, or about 50 to 1750 base pairs, or about 100 to 1500 base pairs, or about 200 to 1250 base pairs, or about 300 to 1000 base pairs, or about 400 to about 750 base pairs, or about 500 to 600 base pairs. In some embodiments, the upstream or downstream sequence has about 50, about 100, about 250, about 500, about 100, about 1250, about 1500, about 1750, about 2000, about 2250, or about 2500 base pairs.

[0361] In some embodiments, upon the insertion of the SoI, the target sequence in the chromosome and the target sequence in the plasmid are not reconstituted. That is, in some embodiments, the resulting sequence in the chromosome (i.e., the resulting sequence from insertion of the SoI) does not hybridize to any of the first, second, third, or fourth guide polynucleotides. Thus, in some embodiments, the resulting sequence in the chromosome comprising the SoI is not susceptible to cleavage by the first or second Cas9-endonuclease dimers, or any of the monomers in the first or second Cas9-endonuclease dimers. As exemplified in FIGS. 13 and 15, the resulting “Knockin” sequence (“Expected 5′ junction”) is a different sequence from the “Genome” and “Vector” sequences, and the “Knockin” sequence does not have a hybridizable sequence to any of gRNA1, gRNA2, gRNA3, or gRNA4.

[0362] In some embodiments, the method of the present disclosure further comprises introducing into the cell a first guide polynucleotide that forms a complex with the first monomer of the first Cas9-endonuclease dimer and comprises a first guide sequence, wherein the first guide sequence hybridizes to the TSC comprising region 1 but does not hybridize to the vector. As exemplified by FIGS. 13 and 15, the first guide sequence (shown as “gRNA1”) binds to a portion of Region1 as well as several nucleotides outside of Region1 on the non-coding strand of the target DNA in the genome. gRNA1 does not hybridize to any other sequence in the genome or the vector. In some embodiments, the first guide polynucleotide forms a complex with the first monomer of the first Cas9-endonuclease dimer by interaction with the binding domain of the Cas9.

[0363] In some embodiments, the method of the present disclosure further comprises introducing into the cell a second guide polynucleotide that forms a complex with the second monomer of the first Cas9-endonuclease dimer and comprises a second guide sequence, wherein the second guide sequence hybridizes to the TSC comprising region 2 but does not hybridize to the vector. As exemplified by FIGS. 13 and 15, the second guide sequence (shown as “gRNA2”) binds to a portion of Region2 on the coding strand of the target DNA in the genome. gRNA2 does not hybridize to any other sequence in the genome or the vector. In some embodiments, the second guide polynucleotide forms a complex with the second monomer of the first Cas9-endonuclease dimer by interacting with the binding domain of the Cas9.

[0364] In some embodiments, the method of the present disclosure further comprises introducing into the cell a third guide polynucleotide that forms a complex with the first monomer of the second Cas9-endonuclease dimer and comprises a third guide sequence, wherein the third guide sequence hybridizes to the TSV comprising region 2 but does not hybridize to the genome. As exemplified by FIGS. 13 and 15, the third guide sequence (shown as “gRNA3”) binds to a portion of Region2 as well as several nucleotides outside of Region2 on the non-coding strand of the target DNA in the vector. gRNA3 does not hybridize to any other sequence in the genome or the vector. In some embodiments, the third guide polynucleotide forms a complex with the first monomer of the second Cas9-endonuclease dimer by interaction with the binding domain of the Cas9.

[0365] In some embodiments, the method of the present disclosure further comprises introducing into the cell a fourth guide polynucleotide that forms a complex with the second monomer of the second Cas9-endonuclease dimer and comprises a fourth guide sequence, wherein the fourth guide sequence hybridizes to the TSC comprising region 1 but does not hybridize to the genome. As exemplified by FIGS. 13 and 15, the fourth guide sequence (shown as “gRNA4”) binds to a portion of Region1 on the coding strand of the target DNA in the vector. gRNA4 does not hybridize to any other sequence in the genome or the vector. In some embodiments, the fourth guide polynucleotide forms a complex with the second monomer of the second Cas9-endonuclease dimer by interacting with the binding domain of the Cas9.

[0366] In some embodiments, a guide polynucleotide is capable of binding to both the TSC and the TSV. Thus, in some embodiments, the method further comprises introducing into the cell a first guide polynucleotide that forms a complex with the first monomer of the first Cas9-endonuclease dimer and comprises a first guide sequence, wherein the first guide sequence hybridizes to the TSC and the TSV.

[0367] In some embodiments, the method further comprises introducing into the cell a second guide polynucleotide that forms a complex with the second monomer of the first Cas9-endonuclease dimer and comprises a second guide sequence, wherein the second guide sequence hybridizes to the TSC and the TSV.

[0368] In some embodiments, the method further comprises introducing into the cell a third guide polynucleotide that forms a complex with the first monomer of the second Cas9-endonuclease dimer and comprises a third guide sequence, wherein the third guide sequence hybridizes to the TSC and the TSV.

[0369] In some embodiments, the method further comprises introducing into the cell a fourth guide polynucleotide that forms a complex with the second monomer of the second Cas9-endonuclease dimer and comprises a fourth guide sequence, wherein the fourth guide sequence hybridizes to the TSC and the TSV.

[0370] In some embodiments, the first, second, third, and/or fourth guide polynucleotides are the same. In some embodiments, the first, second, third, and/or fourth guide polynucleotides are different.

[0371] In some embodiments, the method of the present disclosure comprises introducing into the cell the first, second, third, and fourth guide polynucleotides. In some embodiments, the first monomer of the first Cas9-endonuclease dimer forms a complex with the first guide polynucleotide, and the second monomer of the first Cas9-endonuclease dimer forms a complex with the second guide polynucleotide. In some embodiments, the first monomer of the second Cas9-endonuclease dimer forms a complex with the third guide polynucleotide, and the second monomer of the second Cas9-endonuclease dimer forms a complex with the fourth guide polynucleotide.

[0372] In some embodiments, the first monomer of the first Cas9-endonuclease dimer forms a complex with the first guide polynucleotide, the second monomer of the first Cas9-endonuclease dimer forms a complex with the second guide polynucleotide, the first monomer of the second Cas9-endonuclease dimer forms a complex with the third guide polynucleotide, and the second monomer of the second Cas9-endonuclease dimer forms a complex with the fourth guide polynucleotide. In some embodiments, the first and second guide polynucleotides guide the first Cas9-endonuclease dimer to a target sequence on the chromosome of the cell, and the third and fourth guide polynucleotides guide the second Cas9-endonuclease dimer to a target sequence on the vector introduced into the cell.

[0373] In some embodiments, the method of the present disclosure further comprises introducing into the cell a tracrRNA. In some embodiments, the guide polynucleotide comprises a crRNA/tracrRNA hybrid. In some embodiments, the tracrRNA component of the guide polynucleotide activates the Cas9 of the Cas9-endonuclease. In some embodiments, a Cas9-endonuclease, guide polynucleotide, and tracrRNA are capable of forming a complex. In some embodiments, the complex comprises a Cas9-endonuclease, two guide polynucleotides, and two tracrRNA sequences. In some embodiments, the complex of Cas9-endonuclease, guide polynucleotide, and tracrRNA does not occur in nature.

[0374] In some embodiments, the first monomer of the first Cas9-endonuclease dimer forms a complex with the first guide polynucleotide sequence and a tracrRNA sequence, and the second monomer of the first Cas9-endonuclease dimer forms a complex with the second guide polynucleotide sequence and a tracrRNA sequence. In some embodiments, the first monomer of the second Cas9-endonuclease dimer forms a complex with the third guide polynucleotide sequence and a tracrRNA sequence, and the second monomer of the second Cas9-endonuclease dimer forms a complex with the fourth guide polynucleotide sequence and a tracrRNA sequence.

[0375] In some embodiments, the first monomer of the first Cas9-endonuclease dimer forms a complex with the first guide polynucleotide and a tracrRNA, the second monomer of the first Cas9-endonuclease dimer forms a complex with the second guide polynucleotide and a tracrRNA, the first monomer of the second Cas9-endonuclease dimer forms a complex with the third guide polynucleotide and a tracrRNA, and the second monomer of the second Cas9-endonuclease dimer forms a complex with the fourth guide polynucleotide and a tracrRNA. In some embodiments, the first guide polynucleotide and tracrRNA and second guide polynucleotide and tracrRNA guide the first Cas9-endonuclease dimer to a target sequence on the chromosome of the cell, and the third guide polynucleotide and tracrRNA and fourth guide polynucleotide and tracrRNA guide the second Cas9-endonuclease dimer to a target sequence on the vector introduced into the cell.

[0376] In embodiments of the method, the TSV, first and/or second Cas9-endonuclease dimers are introduced into the cell as polynucleotide(s) encoding the first and second Cas9-endonuclease dimers. In some embodiments, the polynucleotide encoding the TSV, first and/or second Cas9-endonuclease dimers are codon-optimized for expression in a eukaryotic cell. In some embodiments, the polynucleotide encoding the TSV, first and/or second Cas9-endonuclease dimers are codon-optimized for expression in a mammalian cell. Codon optimization methods and techniques are described herein.

[0377] In some embodiments, the TSV, first and/or second Cas9-endonuclease dimers are introduced into the cell as a single nucleic acid molecule. In some embodiments, the polynucleotide encoding the TSV, first and/or second Cas9-endonuclease dimers is on a single vector. In some embodiments, the polynucleotide encoding the first and second Cas9-endonuclease dimers, one or more guide polynucleotides, and one or more tracrRNA sequences is on a single vector. In some embodiments, the vector is an expression vector. In some embodiments, the vector is a eukaryotic expression vector. In some embodiments, the vector is a mammalian expression vector. In some embodiments, the vector is a human expression vector. In some embodiments, the vector is a plant expression vector.

[0378] In some embodiments, the polynucleotide encoding the TSV, first and/or second Cas9-endonuclease dimers is on more than one vector. In some embodiments, the polynucleotide encoding the TSV, first and/or second Cas9-endonuclease dimers, one or more guide polynucleotides, and one or more tracrRNA sequences is on more than one vector. In some embodiments, the vectors are expression vectors. In some embodiments, the vectors are eukaryotic expression vectors. In some embodiments, the vectors are mammalian expression vectors. In some embodiments, the vectors are human expression vectors. In some embodiments, the vectors are plant expression vectors.

[0379] In embodiments of the method, the cell is a eukaryotic cell. In some embodiments, the eukaryotic cell is an animal or human cell. In some embodiments, the eukaryotic cell is a human or rodent or bovine cell line or cell strain. Examples of such cells, cell lines, or cell strains include, but are not limited to, mouse myeloma (NSO)-cell lines, Chinese hamster ovary (CHO)-cell lines, HT1080, H9, HepG2, MCF7, MDBK Jurkat, NIH3T3, PC12, BHK (baby hamster kidney cell), VERO, SP2/0, YB2/0, Y0, C127, L cell, COS, e.g., COS1 and COS7, QC1-3, HEK-293, VERO, PER.C6, HeLA, EB1, EB2, EB3, oncolytic or hybridoma-cell lines. In some embodiments, the eukaryotic cells are CHO-cell lines. In some embodiments, the eukaryotic cell is a CHO cell. In some embodiments, the cell is a CHO-K1 cell, a CHO-K1 SV cell, a DG44 CHO cell, a DUXB11 CHO cell, a CHOS, a CHO GS knock-out cell, a CHO FUT8 GS knock-out cell, a CHOZN, or a CHO-derived cell. The CHO GS knock-out cell (e.g., GSKO cell) is, for example, a CHO-K1 SV GS knockout cell. The CHO FUT8 knockout cell is, for example, the Potelligent® CHOK1 SV (Lonza Biologics, Inc.). Eukaryotic cells can also be avian cells, cell lines or cell strains, such as for example, EBx® cells, EB14, EB24, EB26, EB66, or EBv13.

[0380] In some embodiments, the eukaryotic cell is a human cell. In some embodiments, the human cell is a stem cell. The stem cells can be, for example, pluripotent stem cells, including embryonic stem cells (ESCs), adult stem cells, induced pluripotent stem cells (iPSCs), tissue specific stem cells (e.g., hematopoietic stem cells) and mesenchymal stem cells (MSCs). In some embodiments, the human cell is a differentiated form of any of the cells described herein. In some embodiments, the eukaryotic cell is a cell derived from any primary cell in culture. In some embodiments, the cell is a stem cell or stem cell line.

[0381] In some embodiments, the eukaryotic cell is a hepatocyte such as a human hepatocyte, animal hepatocyte, or a non-parenchymal cell. For example, the eukaryotic cell can be a plateable metabolism qualified human hepatocyte, a plateable induction qualified human hepatocyte, plateable Qualyst Transporter Certified™ human hepatocyte, suspension qualified human hepatocyte (including 10-donor and 20-donor pooled hepatocytes), human hepatic kupffer cells, human hepatic stellate cells, dog hepatocytes (including single and pooled Beagle hepatocytes), mouse hepatocytes (including CD-1 and C57BI/6 hepatocytes), rat hepatocytes (including Sprague-Dawley, Wistar Han, and Wistar hepatocytes), monkey hepatocytes (including Cynomolgus or Rhesus monkey hepatocytes), cat hepatocytes (including Domestic Shorthair hepatocytes), and rabbit hepatocytes (including New Zealand White hepatocytes).

[0382] In some embodiments, the eukaryotic cell is a plant cell. For example, the plant cell can be of a crop plant such as cassava, corn, sorghum, wheat, or rice. The plant cell can be of an algae, tree, or vegetable. The plant cell can be of a monocot or dicot or of a crop or grain plant, a production plant, fruit, or vegetable. For example, the plant cell can be of a tree, e.g., a citrus tree such as orange, grapefruit, or lemon tree; peach or nectarine trees; apple or pear trees; nut trees such as almond or walnut or pistachio trees; nightshade plants, i.e., potatoes; plants of the genus Brassica, plants of the genus Lactuca; plants of the genus Spinacia; plants of the genus Capsicum; cotton, tobacco, asparagus, carrot, cabbage, broccoli, cauliflower, tomato, eggplant, pepper, lettuce, spinach, strawberry, blueberry, raspberry, blackberry, grape, coffee, cocoa, etc.

[0383] In embodiments of the method, a first Cas9-endonuclease dimer capable of generating cohesive ends in the TSC and a second Cas9-endonuclease dimer capable of generating cohesive ends in the TSV are introduced into a cell via delivery particles, vesicles, or viral vectors.

[0384] In some embodiments, the TSV, first and/or second Cas9-endonuclease dimers are delivered into the cell via a delivery particle. Examples of delivery particles are provided herein. In some embodiments, the delivery particle is a lipid-based system, a liposome, a micelle, a microvesicle, an exosome, or a gene gun. In some embodiments, the delivery particle comprises both monomers of the Cas9-endonuclease dimer. In some embodiments, the delivery particle comprises both monomers of both Cas9-endonuclease dimers. In some embodiments, the delivery particle comprises a Cas9-endonuclease and a guide polynucleotide. In some embodiments, the delivery particle comprises a Cas9-endonuclease and a guide polynucleotide, wherein the Cas9-endonuclease and the guide polynucleotide are in a complex. In some embodiments, the delivery particle comprises a polynucleotide encoding a Cas9-endonuclease, a polynucleotide encoding a guide polynucleotide, and a polynucleotide comprising a tracrRNA. In some embodiments, the delivery particle comprises a Cas9-endonuclease, a guide polynucleotide, and a tracrRNA. In some embodiments, the delivery particle comprises the first and/or second Cas9-endonuclease dimers, the first, second, third, and/or fourth guide polynucleotides, and a tracrRNA. In some embodiments, the delivery particle comprises a polynucleotide encoding one or more Cas9-endonucleases, a polynucleotide encoding the first, second, third, and/or fourth guide polynucleotides, and a polynucleotide encoding a tracrRNA.

[0385] In some embodiments, the delivery particle further comprises a lipid, a sugar, a metal or a protein. In some embodiments, the delivery particle is a lipid envelope. In some embodiments, the delivery particle is a sugar-based particle, for example, GalNAc. In some embodiments, the delivery particle is a nanoparticle. Examples of nanoparticles are described herein. Preparation of delivery particles is further described in U.S. Patent Publication Nos. 2011/0293703, 2012/0251560, and 2013/0302401; and U.S. Pat. Nos. 5,543,158, 5,855,913, 5,895,309, 6,007,845, and 8,709,843, each of which is incorporated by reference herein in its entirety.

[0386] In some embodiments, the TSV, first and/or second Cas9-endonuclease dimers are delivered into the cell via a vesicle. A “vesicle” is a small structure within a cell having a fluid enclosed by a lipid bilayer. Examples of vesicles are provided herein. In some embodiments, the vesicle comprises both monomers of the Cas9-endonuclease dimer. In some embodiments, the vesicle comprises both monomers of both Cas9-endonuclease dimers. In some embodiments, the vesicle comprises a Cas9-endonuclease and a guide polynucleotide. In some embodiments, the vesicle comprises a Cas9-endonuclease and a guide polynucleotide, wherein the Cas9-endonuclease and the guide polynucleotide are in a complex. In some embodiments, the vesicle comprises a polynucleotide encoding a Cas9-endonuclease, a polynucleotide encoding a guide polynucleotide, and a polynucleotide comprising a tracrRNA. In some embodiments, the vesicle comprises a Cas9-endonuclease, a guide polynucleotide, and a tracrRNA. In some embodiments, the vesicle comprises the first and/or second Cas9-endonuclease dimers, the first, second, third, and/or fourth guide polynucleotides, and a tracrRNA. In some embodiments, the vesicle comprises a polynucleotide encoding one or more Cas9-endonucleases, a polynucleotide encoding the first, second, third, and/or fourth guide polynucleotides, and a polynucleotide encoding a tracrRNA.

[0387] In some embodiments, the vesicle is an exosome or a liposome. In some embodiments, the first and/or second Cas9-endonuclease dimer is delivered into the cell via an exosome. Exosomes are endogenous nano-vesicles (i.e., having a diameter of about 30 to about 100 nm) that transport RNAs and proteins, and which can deliver RNA to the brain and other target organs. Engineered exosomes for delivery of exogenous biological materials into target organs is described, for example, by Alvarez-Erviti et al., Nature Biotechnology 29: 341 (2011), El-Andaloussi et al., Nature Protocols 7: 2112-2116 (2012), and Wahlgren et al., Nucleic Acids Research 40(17): e130 (2012), each of which is incorporated by reference herein in its entirety.

[0388] In some embodiments, the TSV, first and/or second Cas9-endonuclease dimer is delivered into the cell via a liposome. Liposomes are spherical vesicle structures having at least one lipid bilayer and can be used as a vehicle for administration of nutrients and pharmaceutical drugs. Liposomes are often composed of phospholipids, in particular phosphatidylcholine, but also other lipids such as egg phosphatidylethanolamine. Types of liposomes include, but are not limited to, multilamellar vesicle, small unilamellar vesicle, large unilamellar vesicle, and cochleate vesicle. See, e.g., Spuch and Navarro, “Liposomes for Targeted Delivery of Active Agents against Neurodegenerative Diseases (Alzheimer's Disease and Parkinson's Disease), Journal of Drug Delivery 2011, Article ID 469679 (2011). Liposomes for delivery of biological materials such as CRISPR-Cas components are described, for example, by Morrissey et al., Nature Biotechnology 23(8): 1002-1007 (2005), Zimmerman et al., Nature Letters 441: 111-114 (2006), and Li et al., Gene Therapy 19: 775-780 (2012), each of which is incorporated by reference herein in its entirety.

[0389] In embodiments of the method, the TSV, first and/or second Cas9-endonuclease dimers are delivered into the cell by a viral vector. In some embodiments, the viral vector comprises both monomers of the Cas9-endonuclease dimer. In some embodiments, the viral vector comprises both monomers of both Cas9-endonuclease dimers. In some embodiments, the viral vector comprises the TSV. In some embodiments, the viral vector comprises a Cas9-endonuclease and a guide polynucleotide. In some embodiments, the viral vector comprises a Cas9-endonuclease and a guide polynucleotide, wherein the Cas9-endonuclease and the guide polynucleotide are in a complex. In some embodiments, the viral vector comprises a polynucleotide encoding a Cas9-endonuclease, a polynucleotide encoding a guide polynucleotide, and a polynucleotide comprising a tracrRNA. In some embodiments, the viral vector comprises the first and/or second Cas9-endonuclease dimers, the first, second, third, and/or fourth guide polynucleotides, and a tracrRNA. In some embodiments, the viral vector comprises a polynucleotide encoding one or more Cas9-endonucleases, a polynucleotide encoding the first, second, third, and/or fourth guide polynucleotides, and a polynucleotide encoding a tracrRNA. In some embodiments, the viral vector comprises the TSV, and a polynucleotide encoding one or more Cas9-endonucleases, a polynucleotide encoding the first, second, third, and/or fourth guide polynucleotides, and a polynucleotide encoding a tracrRNA.

[0390] In some embodiments, the viral vector is of an adenovirus, a lentivirus, or an adeno-associated virus. Examples of viral vectors are provided herein. Viral transduction with adeno-associated virus (AAV) and lentiviral vectors (where administration can be local, targeted or systemic) have been used as delivery methods for in vivo gene therapy. In embodiments of the present disclosure, the Cas protein is expressed intracellularly by transduced cells.

[0391] In some embodiments, the first, second, or both Cas9-endonuclease dimers comprise a nuclear localization signal. In some embodiments, the first, second, or both monomers of the first Cas9-endonuclease dimer comprise a nuclear localization signal. In some embodiments, the first, second, or both monomers of the second Cas9-endonuclease dimer comprise a nuclear localization signal. In some embodiments, the first, second, or both monomers of the first, second, or both Cas9-endonuclease dimers comprise a nuclear localization signal. Nuclear localization signals (“NLSs”) are described herein. Exemplary nuclear localization sequences include, but are not limited to the NLS from: SV40 Large T-Antigen, nucleoplasmin, EGL-13, c-Myc, and TUS-protein. In some embodiments, the NLS comprises the sequence PKKKRKV (SEQ ID NO: 1). In some embodiments, the NLS comprises the sequence AVKRPAATKKAGQAKKKKLD (SEQ ID NO: 2). In some embodiments, the NLS comprises the sequence PAAKRVKLD (SEQ ID NO: 3). In some embodiments, the NLS comprises the sequence MSRRRKANPTKLSENAKKLAKEVEN (SEQ ID NO: 4). In some embodiments, the NLS comprises the sequence KLKIKRPVK (SEQ ID NO: 5). Other nuclear localization sequences include, but are not limited to, the acidic M9 domain of hnRNP A1, the sequence KIPIK (SEQ ID NO: 6) in yeast transcription repressor Matα2, and PY-NLSs.

### Methods for Seamless Mutagenesis

[0392] In some embodiments, the present disclosure provides a method of seamlessly modifying one or more nucleotides in a target polynucleotide sequence in a cell. “Seamless mutagenesis” refers to site-directed mutagenesis (i.e., substitution, deletion, or insertion of one or more nucleotides) without any other nearby change, such as the presence of the selectable gene used to introduce the mutation. Seamless DNA engineering for mutagenesis in a protein coding region is advantageous because any extraneous sequence introduced during the mutagenic step could interfere with protein expression. The present disclosure provides seamless mutagenesis using a two-step selection/counter-selection strategy, which first involves insertion at the target site of a selectable cassette such as an antibiotic resistance gene accompanied by a counter-selectable gene. The cassette is then subsequently replaced seamlessly with the desired sequence by selecting against the counter-selectable gene usually involving the administration of a small molecule, such as streptomycin or a sugar. Popular options of counter-selectable markers include sacB, rpsL, as well as markers that can, in the right host background, both be selected for and against including galK, thyA and tolC. Previous methods of seamless mutagenesis were described in, e.g., Wang et al., “Improved seamless mutagenesis by recombineering using ccdB for counterselection,” Nucleic Acids Research 42(5): e37 (2014); Zhang et al., “A new logic for DNA engineering using recombination in Escherichia coli,” Nature Genetics 20(2): 123-128 (1998); Westenberg et al., “Counter-selection recombineering of the baculovirus genome: a strategy for seamless modification of repeat-containing BACs,” Nucleic Acids Research 38: e166 (2010); Wong et al., “Efficient and seamless DNA recombineering using a thymidylate synthase A selection system in Escherichia coli,” Nucleic Acids Research 33: e59 (2005), each of which is incorporated by reference herein in its entirety.

[0393] In some embodiments, the present disclosure provides a method of modifying one or more nucleotides in a target polynucleotide sequence in a cell, the method comprising: (1) introducing into the cell a vector comprising an insertion cassette (IC), the IC comprising, in a 5′ to 3′ direction: (a) a first region homologous to part of the target polynucleotide sequence, (b) a second region comprising a mutation of one or more nucleotides in the target polynucleotide sequence, (c) a first nuclease binding site, (d) a polynucleotide sequence encoding a marker gene, (e) a second nuclease binding site, (f) a third region comprising a mutation of one or more mutations in the target polynucleotide sequence, and (g) a fourth region homologous to part of the target polynucleotide sequence, wherein the first region and the fourth region are 95%-100% identical to their respective parts of the target polynucleotide sequence; (2) inserting the IC into the target polynucleotide sequence via homologous recombination to generate a first modified target polynucleotide; (3) selecting a cell which expresses the marker gene; (4) subjecting the first modified target polynucleotide to a site-specific nuclease to generate a second modified target polynucleotide having cohesive ends; and (5) subjecting the second modified target polynucleotide having cohesive ends to a ligase, wherein the ligase ligates the cohesive ends at the second region and the third region to create a ligated modified target nucleic acid comprising one or more modified nucleotides when compared to the target polynucleotide sequence.

[0394] In some embodiments, the modification of one or more nucleotides in a target polynucleotide sequence is a nucleotide substitution, i.e., a single-nucleotide substitution or multiple-nucleotide substitution. Modification of one or more nucleotides in a target polynucleotide sequence can result in a change in the polypeptide sequence encoded by the polynucleotide. Modification of one or more nucleotides in a target polynucleotide sequence can also result in inactivation of expression of a downstream polynucleotide sequence in the cell. For example, the downstream sequence is inactivated such that the sequence is not transcribed, the coded protein is not produced, or the sequence does not function as the wild-type sequence does. In some embodiments, the target polynucleotide sequence is a regulatory sequence. In some embodiments, a regulatory sequence can be inactivated such that it no longer functions as a regulatory sequence. Examples of regulatory sequences are described herein.

[0395] The method of modifying one or more nucleotides in a target polynucleotide sequence in a cell via seamless mutagenesis utilizes an insertion cassette. In some embodiments, the insertion cassette (IC) is on a vector. Examples of vectors are provided herein. The IC as described herein comprises:
[0396] (i) a first region homologous to part of the target polynucleotide sequence,
[0397] (ii) a second region comprising a mutation of the target polynucleotide sequence of one or more nucleotides,
[0398] (iii) a first nuclease binding site,
[0399] (iv) a polynucleotide sequence encoding a marker gene,
[0400] (v) a second nuclease binding site,
[0401] (vi) a third region comprising a mutation of the target polynucleotide sequence of one or more nucleotides, and
[0402] (vii) a fourth region homologous to part of the target polynucleotide sequence, wherein the first region and the fourth region are 95%-100% identical to their respective parts of the target polynucleotide sequence.

[0403] An exemplary IC is shown in FIG. 28. In FIG. 28, the IC comprises, in a 5′ to 3′ (with respect to the “top” or “coding” strand of double-stranded DNA) direction: a first nuclease cutting site, a first nuclease binding site, a resistance marker, a second nuclease binding site, and a second nuclease cutting site. The first and second nuclease cutting sites comprise the desired nucleotide mutation within the target polynucleotide sequence.

[0404] As shown in FIG. 27, “homology arms” (“HA”) are present upstream of the first nuclease cutting site and downstream of the second nuclease cutting site. The “homology arms” comprise regions homologous to part of the target polynucleotide sequence. In some embodiments, the first region of the IC homologous to part of the target polynucleotide sequence comprises the HA upstream of the first nuclease cutting site. In some embodiments, the fourth region of the IC homologous to part of the target polynucleotide sequence comprises the HA downstream of the second nuclease cutting site.

[0405] In some embodiments, the IC comprises a first region homologous to a part of a target polynucleotide sequence. In some embodiments, the IC comprises a fourth region homologous to a part of a target polynucleotide sequence. In some embodiments, the first and fourth regions in the IC have at least 70%, at least 75%, at least 80%, at least 85%, at least 90%, at least 95%, at least 96%, at least 97%, at least 98%, at least 99%, or 100% sequence identity with their respective parts of the target polynucleotide sequence. In some embodiments, the HA of the first and fourth regions in the IC have about 10 to 5000 base pairs, about 20 to 2000 base pairs, or about 50 to 1750 base pairs, or about 100 to 1500 base pairs, or about 200 to 1250 base pairs, or about 300 to 1000 base pairs, or about 400 to about 750 base pairs, or about 500 to 600 base pairs. In some embodiments, the HA of the first and fourth regions in the IC have about 5, about 10, about 20, about 30, about 40, about 50, about 100, about 250, about 500, about 100, about 1250, about 1500, about 1750, about 2000, about 2250, or about 2500 base pairs.

[0406] In some embodiments, the IC comprises a second region comprising a mutation of the target polynucleotide sequence of one or more nucleotides. In some embodiments, the IC comprises a third region comprising a mutation of the target polynucleotide sequence of one or more nucleotides. As shown in FIGS. 28 and 29, the nuclease cutting sites comprise the mutation of one or more nucleotides within the target polynucleotide sequence. In some embodiments, the nuclease cutting site is the cleavage site of any suitable nuclease. For example, the nuclease cutting site can be the cleavage site of a restriction enzyme, such as, e.g., HindIII, BamHI, EcoRI, BbvI, FokI, MmeI, and the like. In some embodiments, the second region of the IC comprises a first nuclease cutting site comprising the desired mutation. In some embodiments, the third region of the IC comprises a second nuclease cutting site comprising the desired mutation. In some embodiments, the second and third regions of the IC are identical, or substantially identical.

[0407] In some embodiments, the IC comprises a first and second nuclease binding sites. The nuclease binding site can be the binding site of any suitable nuclease. For example, the nuclease binding site of a restriction enzyme, a zinc finger nuclease, a TALEN (transcription activator-like endonuclease), or a Cas9. For example, if the nuclease is Cas9, a guide RNA can be designed to hybridize to any sequence upstream (i.e., 5′ with respect to the relevant DNA strand) of a PAM. Thus, in some embodiments, the nuclease binding site is upstream of a PAM. In some embodiments, the first and second nuclease binding sites are identical, or substantially identical.

[0408] In some embodiments, the IC comprises a polynucleotide encoding a marker gene. “Marker” genes are used to determine whether a nucleic acid sequence has been successfully inserted into a target sequence. Marker genes can be selectable markers (e.g., resistance or selection markers) or screenable markers (e.g., fluorescent or colorimetric markers).

[0409] Non-limiting examples of resistance/selection markers include: antibiotic resistance genes (e.g., ampicillin-resistance genes, kanamycin resistance genes and the like) and other antibiotic resistance genes; auxotrophic markers (e.g., URA3, HIS3) and/or other host cell selection markers; nucleic acids to facilitate insertion into donor nucleic acid, e.g., transposase and inverted repeats, such as for transposition into a Mycoplasma genome; nucleic acids to support replication and segregation in the host cell, such as an autonomously replicated sequence (ARS) or centromere sequence (CEN).

[0410] Screenable markers will make cells containing the marker gene look different. Non-limiting examples of screenable markers include: green fluorescent protein (GFP) and its variants (e.g., yellow fluorescent protein, red fluorescent protein and the like); β-glucuronidase, used in the GUS assay to detect cells by staining it blue; and X-gal, used in the blue/white screen well-known to one of skill in the art.

[0411] The method of selection of cells which express the marker gene varies depending on the marker used. For example, if an antibiotic resistance marker is used, then selection involves growing a population of cells in a culture medium containing the antibiotic and collecting the cells which survive. If a screenable marker such as GFP is used, then selection involves collecting the cells which are green. Collecting the cells may be performed, for example, by manually picking colonies from a culture plate, or by sorting using a flow cytometry device, e.g. fluorescence-activated cell sorting (FACS).

[0412] In embodiments of the methods for seamless mutagenesis, the first step of the method comprises introducing into the cell a vector comprising the IC. The vector can be introduced into the cell using a method routine in the art, such as, for example, transfection, transduction, cell fusion, and lipofection. Introduction of vectors into a cell is further described herein.

[0413] In embodiments of the methods for seamless mutagenesis, the second step of the method comprises inserting the IC into the target polynucleotide sequence via homologous recombination to generate a first modified target polynucleotide. As exemplified in FIG. 27, the resistance cassette is inserted into the target polynucleotide sequence via homologous recombination (as indicated by the crosses on either side of the “GATC” sequence). As described herein, for specific homologous recombination, the vector will contain sufficiently long regions of homology (i.e., the first and fourth regions in the IC) to sequences of the chromosome to allow complementary binding and incorporation of the vector into the chromosome. As described herein, longer regions of homology, and greater degrees of sequence similarity, may increase the efficiency of homologous recombination.

[0414] In embodiments of the methods for seamless mutagenesis, the third step of the method comprises selecting a cell which expresses the marker gene. As described herein, the method of selection of a cell which expresses the marker gene depends on the selection marker. Selection methods, as well as various types of marker genes, are described herein.

[0415] In embodiments of the methods for seamless mutagenesis, the fourth step of the method comprises subjecting the first modified target polynucleotide (i.e., the first modified target polynucleotide generated from step (2) above) to a site-specific nuclease to generate a second modified target polynucleotide having cohesive ends. In some embodiments, the cohesive ends are in the second and third regions of the IC. The site-specific nuclease can be any site-specific nuclease which generates cohesive ends, including but not limited to restriction enzymes, Cas9-endonucleases described herein, or stiCas9 described herein. In some embodiments, the nuclease generates a double-stranded DNA break comprising cohesive ends. In some embodiments, the site-specific nuclease is exogenous to the cell, i.e., the site-specific nuclease does not occur naturally in the cell. In some embodiments, the site-specific nuclease is introduced into the cell. In some embodiments, the site-specific nuclease is introduced into the cell as a polynucleotide encoding the site-specific nuclease. Methods of introducing polynucleotides (such as, e.g., vectors) are described herein and include, for example, transfection, transduction, cell fusion, and lipofection. In some embodiments, the site-specific nuclease is a recombinant site-specific nuclease. As described herein, recombinant proteins refer to proteins not native to the cell producing them, or proteins with sequences which result from a new combination of genetic material that is not known to exist in nature such as, e.g., proteins expressed from an exogenous nucleic acid introduced into a cell. In some embodiments, the recombinant site-specific nuclease is expressed from a nucleic acid not native to the cell.

[0416] In some embodiments, the site-specific nuclease is a Cas9 effector protein. Cas9 proteins are described herein. In some embodiments, the Cas9 effector protein is a Type II-B Cas9. Type II-B Cas9 proteins are described herein and are capable of generating cohesive ends. As described herein, Type II-B CRISPR systems are identified, inter alia, by the presence of a cas4 gene on the cas operon, and Type II-B Cas9 proteins is of the TIGR03031 TIGRFAM protein family. Thus, in some embodiments, the site-specific nuclease is of the TIGR03031 TIGRFAM protein family. In some embodiments, the site-specific nuclease comprises a domain that matches the TIGR03031 protein family with an E-value cut-off of 1E-5. In some embodiments, the site-specific nuclease comprises a domain that matches the TIGR03031 protein family with an E-value cut-off of 1E-10. Type II-B CRISPR systems are found in bacterial species such as, e.g., Legionella pneumophila, Francisella novicida, gamma proteobacterium HTCC5015, Parasutterella excrementihominis, Sutterella wadsworthensis, Sulfurospirillum sp. SCADC, Ruminobacter sp. RM87, Burkholderiales bacterium 1_1_47, Bacteroidetes oral taxon 274 str. F0058, Wolinella succinogenes, Burkholderiales bacterium YL45, Ruminobacter amylophilus, Campylobacter sp. P0111, Campylobacter sp. RM9261, Campylobacter lanienae strain RM8001, Camplylobacter lanienae strain P0121, Turicimonas muris, Legionella londiniensis, Salinivibrio sharmensis, Leptospira sp. isolate FW.030, Moritella sp. isolate NORP46, Endozoicomonassp. S-B4-1U, Tamilnaduibacter salinus, Vibrio natriegens, Arcobacter skirrowii, Francisella philomiragia, Francisella hispaniensis, or Parendozoicomonas haliclonae.

[0417] In some embodiments, the site-specific nuclease is a Cas9-endonuclease fusion protein. Cas9-endonuclease proteins are described herein. In some embodiments, the Cas9-endonuclease fusion protein comprises the DNA-targeting domain of Cas9 and the nuclease domain of an endonuclease. In some embodiments, the endonuclease in the Cas9-endonuclease fusion protein is a Type IIS endonuclease. Examples of Type IIS endonucleases are provided herein and include: BbvI, BgcI, BfuAI, BmpI, BspMI, CspCI, FokI, MboII, MmeI, NmeAIII, and PleI. In some embodiments, the endonuclease in the Cas9-endonuclease fusion protein is FokI. DNA cleavage by FokI only occurs upon dimerization of two FokI monomers. FokI cleavage of DNA generates cohesive ends with a 4 base-pair overhang.

[0418] In some embodiments, the Cas9-endonuclease fusion protein comprises a modified Cas9. Modified Cas9 is described herein and comprises catalytically inactive Cas9 and Cas9 having nickase activity. In some embodiments, the modified Cas9 is a catalytically inactive Cas9 (“deadCas9”). Catalytically inactive Cas9 are incapable of cleaving DNA (i.e., the cleavage domain of Cas9 is inactivated); however, they retain the ability to target a nucleic acid sequence by forming a complex with a guide polynucleotide (e.g., guide RNA). Catalytically inactive Cas9 are described herein. In some embodiments, catalytically inactive Cas9 comprises a double amino-acid substitution relative to wild-type Cas9. In some embodiments, the double amino-acid substitution is D10A and H840A. In some embodiments, the Cas9-endonuclease fusion protein comprises a catalytically inactive Cas9, and the endonuclease is FokI.

[0419] In some embodiments, the modified Cas9 is a Cas9 having nickase activity (“Cas9 nickase” or “Cas9n”). Cas9 nickases are capable of cleaving only one strand of double-stranded DNA (i.e., “nicking” the DNA). Cas9 nickases are described herein. In some embodiments, Cas9 nickases comprise a single amino-acid substitution relative to wild-type Cas9. In some embodiments, the single amino-acid substitution is D10A (“Cas9n^{(D10A)}”). In some embodiments, the single amino-acid substitution is H840A (“Cas9n^{(H840A)}”). In some embodiments, the Cas9-endonuclease fusion protein comprises a Cas9 having nickase activity, and the endonuclease is FokI. In some embodiments, the Cas9-endonuclease fusion protein comprises a Cas9 having a D10A mutation, and the endonuclease is FokI. In some embodiments, the Cas9-endonuclease fusion protein comprises a Cas9 having an H840A mutation, and the endonuclease is FokI.

[0420] In some embodiments, the site-specific nuclease is Cpf1. Cpf1 (Centromere and Promoter Factor 1) is a single RNA-guided endonuclease found in CRISPR/Cpf1 systems capable of generating cohesive ends. A CRISPR/Cpf1 system is analogous to a CRISPR/Cas9 system. However, there are several significant differences between Cas9 and Cpf1. Cpf1 does not utilize a tracrRNA. Cpf1 proteins recognize a different PAM sequence than Cas9. The PAM sequence of Cpf1 is a 5′ T-rich motif, such as, e.g., 5′-TTTN-3′, wherein N is A, T, C, or G. Cpf1 cleaves at a different site from Cas9. While Cas9 cleaves at a sequence adjacent to the PAM, Cpf1 cleaves at a sequence further away from the PAM. Cp1 proteins are further described in, e.g., foreign patent publication GB 1506509.7, U.S. Pat. No. 9,580,701, U.S. Patent Publication 2016/0208243, and Zetsche et al., “Cpf1 Is a Single RNA-Guided Endonuclease of a Class 2 CRISPR-Cas System,” Cell 163(3): 759-771 (2015), each of which is incorporated by reference herein in its entirety.

[0421] In some embodiments, the site-specific nuclease is Cas9, Cpf1, or Cas9-FokI.

[0422] In some embodiments, the cohesive ends generated by the site-specific nuclease comprise a 5′ overhang. In some embodiments, the cohesive ends generated by the site-specific nuclease comprise a 3′ overhang. In some embodiments, the site-specific nuclease generates cohesive ends comprising a single-stranded polynucleotide of 3 to 40 nucleotides. In some embodiments, the site-specific nuclease generates cohesive ends comprising a single-stranded polynucleotide of 4 to 30 nucleotides. In some embodiments, the site-specific nuclease generates cohesive ends comprising a single-stranded polynucleotide of 5 to 20 nucleotides. In some embodiments, the site-specific nuclease generates cohesive ends comprising a single-stranded polynucleotide of about 5 nucleotides, about 10 nucleotides, about 15 nucleotides, about 20 nucleotides, about 25 nucleotides, or about 30 nucleotides. In some embodiments, a deadCas9-FokI dimer generates cohesive ends comprising a 4-nucleotide 5′ overhang. In some embodiments, a Cas9n^{(D10A)}-FokI dimer generates cohesive ends comprising a 27-nucleotide 5′ overhang. In some embodiments, a Cas9^{(H840A)}-FokI dimer generates cohesive ends comprising a 23-nucleotide 3′-overhang.

[0423] In embodiments of the method, the fifth step of the method comprises subjecting the second modified target polynucleotide having cohesive ends to a ligase, wherein the ligase ligates the cohesive ends at the second region and the third region to create a ligated modified target nucleic acid comprising one or more modified nucleotides when compared to the target polynucleotide sequence. A ligase is an enzyme that catalyzes the joining of two or more nucleic acid fragments by forming a chemical bond. In some embodiments, a ligase joins together two or more DNA fragments by catalyzing the formation of a phosphodiester bond. Any suitable ligase can be used, and the suitable ligase can be determined by one of skill in the art. Non-limiting examples of ligases include: E. coli ligase, T4 DNA ligase from bacteriophage T4, DNA ligase I, DNA ligase II, DNA ligase III, DNA ligase IV, and thermostable ligases such as Ampligase® DNA Ligase. Ligases can ligate blunt ends or cohesive ends. In some embodiments, the ligase ligates cohesive ends. In some embodiments, the ligase requires ATP in order to ligate DNA fragments.

[0424] In some embodiments, the ligase is exogenous to the cell, i.e., the ligase does not occur naturally in the cell. In some embodiments, the ligase is introduced into the cell. In some embodiments, the ligase is introduced into the cell as a polynucleotide encoding a ligase. Methods of introducing polynucleotides (such as, e.g., vectors) are described herein. In some embodiments, the ligase is a recombinant ligase, i.e., a ligase expressed from a nucleic acid not native to the cell.

[0425] In some embodiments, the ligated modified target nucleic acid comprises one or more modified nucleotides when compared with the target polynucleotide sequence, but does not comprise the marker gene or any additional nucleotides upstream or downstream of the target polynucleotide sequence, i.e., the target polynucleotide sequence was mutated seamlessly.

[0426] In embodiments of the method, the first modified target nucleic acid is isolated from the cell after the third step. Methods of isolating nucleic acids from cells are well-established in the art and include, for example, phenol/chloroform extraction, precipitation under low pH/high salt conditions, and solid phase extraction. Commercially available kits for isolation of nucleic acids, such as the QIAGEN Miniprep Kit, Bio-Rad Quantum Prep® Miniprep Kit, and Zymo Research ZYMOPURE Plasmid Miniprep Kit, may be used.

[0427] In embodiments of the method, the first modified target nucleic acid is in the cell after the third step, i.e., the nucleic acid is not isolated from the cell. In some embodiments, steps (1)-(5) of the method are performed within the same cell. In some embodiments, components of the method are introduced into the cell. In some embodiments, the vector comprising the insertion cassette, the site-specific nuclease, and the ligase are introduced into the cell. Methods of introducing vectors and proteins into cells are described herein and include, for example, delivery via delivery particles, vesicles, and/or vectors including viral vectors.

[0428] In embodiments of the method, the target polynucleotide sequence is in a plasmid. Plasmids and examples thereof are described herein. In some embodiments, the plasmid containing the target polynucleotide sequence is a native bacterial plasmid (i.e., a plasmid that occurs naturally in a bacterial cell). In some embodiments, the plasmid containing the target polynucleotide sequence is an exogenous plasmid introduced into a cell. In some embodiments, the cell is a bacterial cell. In some embodiments, the plasmid is an engineered plasmid. In some embodiments, modification of one or more nucleotides in a plasmid leads to a modified behavior of the cell. The modified behavior may be the expression of a modified protein, higher or lower levels of expression of one or more proteins, increased resistance or susceptibility to antibiotics, altered response to small molecules and/or proteins, altered production of small molecules and/or proteins, etc.

[0429] In embodiments of the method, the target polynucleotide sequence is in a chromosome. The chromosome may be a prokaryotic chromosome or eukaryotic chromosome. In some embodiments, the chromosome is of a eukaryotic cell. In some embodiments, the chromosome is of a human cell. In some embodiments, the chromosome is of an animal cell. In some embodiments, the chromosome is of a plant cell. In some embodiments, modification of one or more nucleotides in a chromosome leads to a modified behavior of the cell. The modified behavior may be the expression of a modified protein, higher or lower levels of expression of one or more proteins, increased resistance or susceptibility to antibiotics, altered response to small molecules and/or proteins, altered production of small molecules and/or proteins, etc.

Engineered Guide RNA (sgRNA)

[0430] In some embodiments, the disclosure provides an engineered guide RNA that forms a complex with a stiCas9 protein, comprising: (a) a guide sequence capable of hybridizing to a target sequence in a eukaryotic cell; and (b) a tracrRNA sequence capable of binding to the Cas9 protein, wherein the tracrRNA differs from a naturally-occurring tracrRNA sequence by at least 10 nucleotides, wherein the engineered guide RNA improves nuclease efficiency of the Cas9 protein.

[0431] As described herein, in some embodiments, a guide polynucleotide, e.g., guide RNA, forms a complex with a Cas9 protein, i.e., in some embodiments, a guide polynucleotide binds to Cas9. In some embodiments, the DNA-binding segment of the guide polynucleotide hybridizes with a target sequence in a eukaryotic cell, but not a sequence in a bacterial cell.

[0432] In some embodiments, the guide polynucleotide is 10 to 150 nucleotides. In some embodiments, the guide polynucleotide is 20 to 120 nucleotides. In some embodiments, the guide polynucleotide is 30 to 100 nucleotides. In some embodiments, the guide polynucleotide is 40 to 80 nucleotides. In some embodiments, the guide polynucleotide is 50 to 60 nucleotides. In some embodiments, the guide polynucleotide is 10 to 35 nucleotides. In some embodiments, the guide polynucleotide is 15 to 30 nucleotides. In some embodiments, the guide polynucleotide is 20 to 25 nucleotides.

[0433] The guide polynucleotide can be introduced into the target cell as an isolated molecule, e.g., RNA molecule, or is introduced into the cell using an expression vector containing DNA encoding the guide polynucleotide.

[0434] Naturally-occurring CRISPR systems utilize crRNA, which contains a region complementary to the target sequence, and tracrRNA, which binds to the Cas9 protein and also hybridizes with the crRNA. The crRNA/tracrRNA hybrid forms RNA secondary structures that allow binding of the crRNA portion to the target sequence and binding of the tracrRNA portion to the Cas9 protein. Non-limiting examples of RNA secondary structures include helices, stem loops, and pseudoknots. In some embodiments, the Cas9 protein recognizes at least one stem loop in the crRNA/tracrRNA hybrid for binding.

[0435] In engineered CRISPR-Cas systems, such as, for example, the CRISPR-Cas systems of the disclosure, it may be advantageous to utilize a single guide polynucleotide that can both complement the target sequence and bind the Cas9 protein. Thus, in some embodiments, the disclosure provides a non-naturally occurring CRISPR-Cas system comprising a Cas9 effector protein capable of generating cohesive ends (stiCas9); and a guide polynucleotide that forms a complex with the stiCas9 and comprises a guide sequence, wherein the guide sequence is capable of hybridizing with a target sequence in a eukaryotic cell but does not hybridize to a sequence in a bacterial cell; wherein the complex does not occur in nature, and wherein the system does not comprise a tracrRNA. In some embodiments, the guide polynucleotide forms at least one secondary structure. In some embodiments, the at least one secondary structure is one of a stem loop, a helix, or a pseudoknot.

[0436] It may be advantageous to optimize the engineered guide polynucleotides described herein, in order to improve binding affinity to the Cas9 protein and/or increase targeting efficiency to the target sequence. See, e.g., Dang et al., Genome Biology 16:280 (2015); Nowak et al., Nucleic Acids Res 44(20):9555-9564 (2016); and Vejnar et al., Cold Spring Harb Protoc, doi:10.1101/pdb.top090894 (2016). In some embodiments, the engineered guide polynucleotide, e.g., guide RNA, is shorter than the combination of the naturally-occurring crRNA and tracrRNA. In some embodiments, the engineered guide RNA is at least 5 nucleotides shorter, at least 6 nucleotides shorter, at least 7 nucleotides shorter, at least 8 nucleotides shorter, at least 8 nucleotides shorter, at least 9 nucleotides shorter, at least 10 nucleotides shorter, at least 11 nucleotides shorter, at least 12 nucleotides shorter, at least 13 nucleotides shorter, at least 14 nucleotides shorter, at least 15 nucleotides shorter, at least 16 nucleotides shorter, at least 17 nucleotides shorter, at least 18 nucleotides shorter, at least 19 nucleotides shorter, at least 20 nucleotides shorter, at least 21 nucleotides shorter, at least 22 nucleotides shorter, at least 23 nucleotides shorter, at least 24 nucleotides shorter, at least 25 nucleotides shorter, at least 26 nucleotides shorter, at least 27 nucleotides shorter, at least 28 nucleotides shorter, at least 29 nucleotides shorter, or at least 30 nucleotides shorter than the combination of the naturally-occurring crRNA and tracrRNA.

[0437] In some embodiments, the tracrRNA sequence is at least 5 nucleotides shorter, at least 6 nucleotides shorter, at least 7 nucleotides shorter, at least 8 nucleotides shorter, at least 8 nucleotides shorter, at least 9 nucleotides shorter, at least 10 nucleotides shorter, at least 11 nucleotides shorter, at least 12 nucleotides shorter, at least 13 nucleotides shorter, at least 14 nucleotides shorter, at least 15 nucleotides shorter, at least 16 nucleotides shorter, at least 17 nucleotides shorter, at least 18 nucleotides shorter, at least 19 nucleotides shorter, at least 20 nucleotides shorter, at least 21 nucleotides shorter, at least 22 nucleotides shorter, at least 23 nucleotides shorter, at least 24 nucleotides shorter, at least 25 nucleotides shorter, at least 26 nucleotides shorter, at least 27 nucleotides shorter, at least 28 nucleotides shorter, at least 29 nucleotides shorter, or at least 30 nucleotides shorter than the naturally-occurring tracrRNA sequence.

[0438] In some embodiments, the engineered guide polynucleotide is 5 nucleotides to 40 nucleotides shorter, 6 nucleotides to 40 nucleotides shorter, 7 nucleotides to 40 nucleotides shorter, 8 nucleotides to 40 nucleotides shorter, 9 nucleotides to 40 nucleotides shorter, 10 nucleotides to 40 nucleotides shorter, 11 nucleotides to 40 nucleotides shorter, 12 nucleotides to 40 nucleotides shorter, 13 nucleotides to 40 nucleotides shorter, 14 nucleotides to 40 nucleotides shorter, 15 nucleotides to 40 nucleotides shorter, 16 nucleotides to 40 nucleotides shorter, 17 nucleotides to 40 nucleotides shorter, 18 nucleotides to 40 nucleotides shorter, 19 nucleotides to 40 nucleotides shorter, 20 nucleotides to 40 nucleotides shorter, 21 nucleotides to 40 nucleotides shorter, 22 nucleotides to 40 nucleotides shorter, 23 nucleotides to 40 nucleotides shorter, 24 nucleotides to 40 nucleotides shorter, 25 nucleotides to 40 nucleotides shorter, 26 nucleotides to 40 nucleotides shorter, 27 nucleotides to 40 nucleotides shorter, 28 nucleotides to 40 nucleotides shorter, 29 nucleotides to 40 nucleotides shorter, 30 nucleotides to 40 nucleotides shorter, 31 nucleotides to 40 nucleotides shorter, 32 nucleotides to 40 nucleotides shorter, 33 nucleotides to 40 nucleotides shorter, 34 nucleotides to 40 nucleotides shorter, 35 nucleotides to 40 nucleotides shorter, 36 nucleotides to 40 nucleotides shorter, 37 nucleotides to 40 nucleotides shorter, 38 nucleotides to 40 nucleotides shorter, or 39 nucleotides to 40 nucleotides shorter than the combination of the naturally-occurring crRNA and tracrRNA.

[0439] In some embodiments, the engineered tracrRNA is 5 nucleotides to 40 nucleotides shorter, 6 nucleotides to 40 nucleotides shorter, 7 nucleotides to 40 nucleotides shorter, 8 nucleotides to 40 nucleotides shorter, 9 nucleotides to 40 nucleotides shorter, 10 nucleotides to 40 nucleotides shorter, 11 nucleotides to 40 nucleotides shorter, 12 nucleotides to 40 nucleotides shorter, 13 nucleotides to 40 nucleotides shorter, 14 nucleotides to 40 nucleotides shorter, 15 nucleotides to 40 nucleotides shorter, 16 nucleotides to 40 nucleotides shorter, 17 nucleotides to 40 nucleotides shorter, 18 nucleotides to 40 nucleotides shorter, 19 nucleotides to 40 nucleotides shorter, 20 nucleotides to 40 nucleotides shorter, 21 nucleotides to 40 nucleotides shorter, 22 nucleotides to 40 nucleotides shorter, 23 nucleotides to 40 nucleotides shorter, 24 nucleotides to 40 nucleotides shorter, 25 nucleotides to 40 nucleotides shorter, 26 nucleotides to 40 nucleotides shorter, 27 nucleotides to 40 nucleotides shorter, 28 nucleotides to 40 nucleotides shorter, 29 nucleotides to 40 nucleotides shorter, 30 nucleotides to 40 nucleotides shorter, 31 nucleotides to 40 nucleotides shorter, 32 nucleotides to 40 nucleotides shorter, 33 nucleotides to 40 nucleotides shorter, 34 nucleotides to 40 nucleotides shorter, 35 nucleotides to 40 nucleotides shorter, 36 nucleotides to 40 nucleotides shorter, 37 nucleotides to 40 nucleotides shorter, 38 nucleotides to 40 nucleotides shorter, or 39 nucleotides to 40 nucleotides shorter than the naturally-occurring tracrRNA.

[0440] In some embodiments, the engineered guide polynucleotide, e.g., guide RNA, is longer than the combination of the naturally-occurring crRNA and tracrRNA. In some embodiments, the engineered guide RNA is at least 5 nucleotides longer, at least 6 nucleotides longer, at least 7 nucleotides longer, at least 8 nucleotides longer, at least 8 nucleotides longer, at least 9 nucleotides longer, at least 10 nucleotides longer, at least 11 nucleotides longer, at least 12 nucleotides longer, at least 13 nucleotides longer, at least 14 nucleotides longer, at least 15 nucleotides longer, at least 16 nucleotides longer, at least 17 nucleotides longer, at least 18 nucleotides longer, at least 19 nucleotides longer, at least 20 nucleotides longer, at least 21 nucleotides longer, at least 22 nucleotides longer, at least 23 nucleotides longer, at least 24 nucleotides longer, at least 25 nucleotides longer, at least 26 nucleotides longer, at least 27 nucleotides longer, at least 28 nucleotides longer, at least 29 nucleotides longer, or at least 30 nucleotides longer than the combination of the naturally-occurring crRNA and tracrRNA.

[0441] In some embodiments, the tracrRNA sequence is at least 5 nucleotides longer, at least 6 nucleotides longer, at least 7 nucleotides longer, at least 8 nucleotides longer, at least 8 nucleotides longer, at least 9 nucleotides longer, at least 10 nucleotides longer, at least 11 nucleotides longer, at least 12 nucleotides longer, at least 13 nucleotides longer, at least 14 nucleotides longer, at least 15 nucleotides longer, at least 16 nucleotides longer, at least 17 nucleotides longer, at least 18 nucleotides longer, at least 19 nucleotides longer, at least 20 nucleotides longer, at least 21 nucleotides longer, at least 22 nucleotides longer, at least 23 nucleotides longer, at least 24 nucleotides longer, at least 25 nucleotides longer, at least 26 nucleotides longer, at least 27 nucleotides longer, at least 28 nucleotides longer, at least 29 nucleotides longer, or at least 30 nucleotides longer than the naturally-occurring tracrRNA sequence.

[0442] In some embodiments, the engineered guide polynucleotide is 5 nucleotides to 40 nucleotides longer, 6 nucleotides to 40 nucleotides longer, 7 nucleotides to 40 nucleotides longer, 8 nucleotides to 40 nucleotides longer, 9 nucleotides to 40 nucleotides longer, 10 nucleotides to 40 nucleotides longer, 11 nucleotides to 40 nucleotides longer, 12 nucleotides to 40 nucleotides longer, 13 nucleotides to 40 nucleotides longer, 14 nucleotides to 40 nucleotides longer, 15 nucleotides to 40 nucleotides longer, 16 nucleotides to 40 nucleotides longer, 17 nucleotides to 40 nucleotides longer, 18 nucleotides to 40 nucleotides longer, 19 nucleotides to 40 nucleotides longer, 20 nucleotides to 40 nucleotides longer, 21 nucleotides to 40 nucleotides longer, 22 nucleotides to 40 nucleotides longer, 23 nucleotides to 40 nucleotides longer, 24 nucleotides to 40 nucleotides longer, 25 nucleotides to 40 nucleotides longer, 26 nucleotides to 40 nucleotides longer, 27 nucleotides to 40 nucleotides longer, 28 nucleotides to 40 nucleotides longer, 29 nucleotides to 40 nucleotides longer, 30 nucleotides to 40 nucleotides longer, 31 nucleotides to 40 nucleotides longer, 32 nucleotides to 40 nucleotides longer, 33 nucleotides to 40 nucleotides longer, 34 nucleotides to 40 nucleotides longer, 35 nucleotides to 40 nucleotides longer, 36 nucleotides to 40 nucleotides longer, 37 nucleotides to 40 nucleotides longer, 38 nucleotides to 40 nucleotides longer, or 39 nucleotides to 40 nucleotides longer than the combination of the naturally-occurring crRNA and tracrRNA.

[0443] In some embodiments, the engineered tracrRNA is 5 nucleotides to 40 nucleotides longer, 6 nucleotides to 40 nucleotides longer, 7 nucleotides to 40 nucleotides longer, 8 nucleotides to 40 nucleotides longer, 9 nucleotides to 40 nucleotides longer, 10 nucleotides to 40 nucleotides longer, 11 nucleotides to 40 nucleotides longer, 12 nucleotides to 40 nucleotides longer, 13 nucleotides to 40 nucleotides longer, 14 nucleotides to 40 nucleotides longer, 15 nucleotides to 40 nucleotides longer, 16 nucleotides to 40 nucleotides longer, 17 nucleotides to 40 nucleotides longer, 18 nucleotides to 40 nucleotides longer, 19 nucleotides to 40 nucleotides longer, 20 nucleotides to 40 nucleotides longer, 21 nucleotides to 40 nucleotides longer, 22 nucleotides to 40 nucleotides longer, 23 nucleotides to 40 nucleotides longer, 24 nucleotides to 40 nucleotides longer, 25 nucleotides to 40 nucleotides longer, 26 nucleotides to 40 nucleotides longer, 27 nucleotides to 40 nucleotides longer, 28 nucleotides to 40 nucleotides longer, 29 nucleotides to 40 nucleotides longer, 30 nucleotides to 40 nucleotides longer, 31 nucleotides to 40 nucleotides longer, 32 nucleotides to 40 nucleotides longer, 33 nucleotides to 40 nucleotides longer, 34 nucleotides to 40 nucleotides longer, 35 nucleotides to 40 nucleotides longer, 36 nucleotides to 40 nucleotides longer, 37 nucleotides to 40 nucleotides longer, 38 nucleotides to 40 nucleotides longer, or 39 nucleotides to 40 nucleotides longer than the naturally-occurring tracrRNA.

[0444] In some embodiments, the engineered guide polynucleotide differs from the combination of the naturally-occurring crRNA and tracrRNA by at least one nucleotide, such that the binding affinity and/or the targeting efficiency of the engineered guide polynucleotide is higher than that of the naturally-occurring crRNA/tracrRNA hybrid. In some embodiments, the engineered guide polynucleotide differs from crRNA/tracrRNA hybrid by at least 2, at least 3, at least 4, at least 5, at least 6, at least 7, at least 8, at least 9, at least 10, at least 11, at least 12, at least 13, at least 14, at least 15, at least 16, at least 17, at least 18, at least 19, at least 20, at least 21, at least 22, at least 23, at least 24, at least 25, at least 26, at least 27, at least 28, at least 29, or at least 30 nucleotides. In some embodiments, the engineered tracrRNA differs from naturally occurring tracrRNA by at least 2, at least 3, at least 4, at least 5, at least 6, at least 7, at least 8, at least 9, at least 10, at least 11, at least 12, at least 13, at least 14, at least 15, at least 16, at least 17, at least 18, at least 19, at least 20, at least 21, at least 22, at least 23, at least 24, at least 25, at least 26, at least 27, at least 28, at least 29, or at least 30 nucleotides.

[0445] In some embodiments, modifications are made to a naturally-occurring tracrRNA to improve nuclease efficiency of a Cas9 protein. In some embodiments, the modification is in a stem loop of the tracrRNA. In some embodiments, the modification is elongation of the stem loop. In some embodiments, the modification is shortening of the stem loop. In some embodiments, the modification is one or more nucleotide substitutions in the stem loop. In some embodiments, the modification is to a stem-loop as shown in FIG. 41.

[0446] In some embodiments, the nuclease efficiency of the Cas9 protein, with the engineered guide RNA, improves by at least about 30%, at least about 40%, at least about 50%, at least about 60%, at least about 70%, at least about 80%, at least about 90%, or at least about 100%. In some embodiments, the nuclease efficiency of the Cas9 protein, with the engineered guide RNA, improves by at least about two-fold, at least about three-fold, at least about four-fold, at least about five-fold, at least about six-fold, at least about seven-fold, at least about eight-fold, at least about nine-fold, or at least about ten-fold.

[0447] The nuclease efficiency of the Cas9 protein can be measured, for example, in order to compare the nuclease efficiency of a Cas9 protein complexed with a naturally-occurring guide RNA, with a Cas9 protein complexed with the engineered guide RNA described herein. In some embodiments, the measurement method is a biochemical assay, such as, for example, measurement of the rate of in vitro Cas9 nuclease activity against a linear or circular template. In some embodiments, the measurement method measures targeting efficiency of the Cas9 protein using, for example, next-generation sequencing, T7 endonuclease I assay, and/or Cell assay. In some embodiments, the measurement method is an affinity test between the Cas9 protein and the tracrRNA using, for example, the BIACORE system.

[0448] In some embodiments, the guide sequence comprises at least 90% sequence identity to any one of SEQ ID NOs: 104-125 or 196-199. In some embodiments, the tracrRNA sequence comprises at least 90% sequence identity to any one of SEQ ID NOs: 148-171. In some embodiments, the guide RNA comprises at least 90% sequence identity to any one of SEQ ID NOs: 172-191.

[0449] In some embodiments, the engineered guide RNA, or the crRNA portion of the guide RNA, has at least 90% sequence identity to any one of SEQ ID NO: 104-125 or 196-199. In some embodiments, the guide RNA, or the crRNA portion of the guide RNA, has at least 50%, at least 55%, at least 60%, at least 65%, at least 70%, at least 75%, at least 80%, at least 85%, at least 90%, at least 91%, at least 92%, at least 93%, at least 94%, at least 95%, at least 96%, at least 97%, at least 98%, or at least 99% sequence identity to any one of SEQ ID NO: 104-125 or 196-199.

[0450] In some embodiments, the protein-binding segment, or the tracrRNA sequence, of engineered guide polynucleotide has at least 90% sequence identity to any one of SEQ ID NOs: 102 and 148-171. In some embodiments, the protein-binding segment of the engineered guide polynucleotide has at least 50%, at least 55%, at least 60%, at least 65%, at least 70%, at least 75%, at least 80%, at least 85%, at least 90%, at least 91%, at least 92%, at least 93%, at least 94%, at least 95%, at least 96%, at least 97%, at least 98%, or at least 99% sequence identity to any one of SEQ ID NO: 102 and 148-171.

[0451] In some embodiments, the disclosure provides an engineered guide polynucleotide for a Cas9 protein, having at least 90% sequence identity to any one of SEQ ID NOs: 172-191. In some embodiments, the engineered guide polynucleotide has at least 50%, at least 55%, at least 60%, at least 65%, at least 70%, at least 75%, at least 80%, at least 85%, at least 90%, at least 91%, at least 92%, at least 93%, at least 94%, at least 95%, at least 96%, at least 97%, at least 98%, or at least 99% sequence identity to any one of SEQ ID NO: 172-191.

[0452] Guide polynucleotides described herein may be designed using bioinformatics tools with biochemical validation. An exemplary process for designing a guide polynucleotide is as follows: (1) find a relevant CRISPR operon using protein BLAST; (2) search for crRNAs which are already annotated in the genome, or annotate the CRISPR using, e.g., CRISPR-Finder; (3) determine the possible location of tracrRNA using an alignment tool, e.g., the CLC Genomics Workbench (QIAGEN); (4) search for a TATAA Box in the vicinity of the regions with similarity to the crRNA; (5) test the secondary structure of the crRNA and all possible tracrRNAs found during the alignment and select the crRNA/tracrRNA hybrid that makes the desired secondary structure; and (6) trim the crRNA and the tracrRNA to create a short guide RNA (sgRNA). For example, the crRNA and tracrRNA sequences described herein may be combined to generate a sgRNA. In some embodiments, the crRNA and tracrRNA sequences are combined as shown in Table 1 to generate a sgRNA.

TABLE 1
Short Guide RNA Sequences (sgRNA) for Cas9 Proteins

| Cas9 Protein | crRNA SEQ ID NO | tracrRNA SEQ ID NO |
|---|---|---|
| LpCas9 | 104 | 148 |
| SsCas9 | 105 | 149 |
| WsCas9 | 106 | 150 |
| BbCas9 | 107 | 151 |
| PeCas9 | 108 | 152 |
| SwCas9 | 109 | 153 |
| RaCas9 | 110 | 154 |
| Csp1Cas9 | 111 | 155 |
| Csp2Cas9 | 112 | 156 |
| Cl 1Cas9 | 113 | 157 |
| C12Cas9 | 114 | 158 |
| MH0245Cas9 | 115 | 159 |
| FnCas9 | 116 | 160 |
| GpCas9 | 117 | 161; 162 |
| TmCas9 | 118 | 163 |
| L1Cas9 | 119 | 164 |
| SshCas9 | 120 | 165 |
| Lept.Cas9 | 121 | 166 |
| MoritellaCas9 | 122 | 167 |
| ExCas9 | 123 | 168 |
| TsCas9 | 124 | 169 |
| VnCas9 | 125 | 170; 171 |

### EXAMPLES

### Example 1

### Targeted Gene Insertion at the AAVS1 Locus

[0453] This Example verified gene insertion into the AAVS1 locus using seamless mutagenesis as disclosed herein (ObLiGaRe 2.0 system).

[0454] Two Cas9n-FokI variants, Cas9n^{D10A} and Cas9n^{H840A} were generated as shown in FIGS. 12 and 14. Two donor vectors were generated as shown in FIGS. 13 and 15, containing ObLiGaRe 2.0 target sites (denoted as Region2 and Region1 in the figures) upstream of a SA-2A-Puro selection cassette. The size of the donor vector was 6 kb. The ObLiGaRe 2.0 target sites were designed based on the AAVS1 locus, as shown in FIG. 16.

[0455] A plasmid encoding one of the Cas9n-FokI variants, 4 separately-cloned guide RNAs (gRNA), and the corresponding donor vector were co-transfected into HEK293 cells. Genomic insertion of the puromycin resistance cassette (gene of interest on the donor plasmid) was shown schematically in FIG. 15.

[0456] Cells which had puromycin resistance were selected, and genomic DNA of the puromycin-resistant cells were collected and subjected to junction PCR. The PCR products were TOPO-cloned and sequenced by Sanger sequencing to determine the precision at the junctions.

[0457] The sequence of 5′ junctions for gene insertion using Cas9n^{D10A}-FokI were shown in FIG. 17. The sequence of 5′ junctions for gene insertion using Cas9n^{H840A}-FokI were shown in FIG. 18. Thus, transgene cassettes were successfully knocked into AAVS1 locus using the ObLiGaRe 2.0 system, with high precision on the expected junctions.

### Example 2

### Evaluating the Efficiency of Targeted Insertion without Antibiotic Selection, and the Influence of Spacer Length on Gene Insertion Efficiency

[0458] In this Example, the influence of spacer length (the off-set sequence between two gRNAs) on the gene insertion efficiency was tested using an experimental set-up that did not require antibiotic selection.

[0459] The AAVS1-Exon2 locus was selected as the target site. Required gRNAs for targeting 10 target sites, differing in the length of the spacer, were designed and cloned as shown in FIG. 19. Accordingly, 10 donor vectors containing the designed ObLiGaRe 2.0 target site and mCherry (under the control of a EF1a promoter) were generated as shown in FIG. 20.

[0460] A plasmid encoding Cas9n^{H840A}-FokI and 2AGFP, 2 of the gRNAs, and the donor vector were co-transfected into HEK293 cells. Selection was carried out as follows: cells were first sorted by FACS for GFP expression, indicating introduction of active Cas9n-FokI. Then, cells were passaged for at least 10 passages, and then sorted by FACS for mCherry expression, indicating insertion of mCherry at the target site. This schematic was shown in FIG. 21.

[0461] Results for the percentage of cells with mCherry vs. the spacer length (indicated in base pairs) were shown in FIG. 22. A spacer length of 17 bp indicated the highest efficiency of mCherry insertion (˜20%). Thus, high efficiency of transgene insertions with ObLiGaRe 2.0 without applying antibiotic selection was achieved.

### Example 3

### Comparison of the Efficiencies of Different Gene Insertions Methods

[0462] In this Example, gene insertion using ObLiGaRe (using zinc finger nucleases), and ObLiGaRe 2.0 were compared.

[0463] ObLiGaRe gene insertion was used for gene insertion into the AAVS1-int1 locus. ObLiGaRe 2.0 using Cas9n-FokI variants were used with 2 or 4 gRNAs, targeting AAVS1-int1 and three sites in SERPINA1-intron1 loci. ObLiGaRe 2.0 using deadCas9-FokI was also tested. The experimental procedure was carried out as described in Example 2 (no antibiotic selection, and cell selection based on FACS measurements of mCherry-positive cells). The donor plasmid for the SERPINA1 loci is shown in FIG. 23. Genomic insertion of the gene of interest on the donor plasmid using deadCas9-FokI was shown in FIG. 24.

[0464] The results obtained for each of the gene insertion methods tested were shown in FIG. 25. The results were obtained from three independent biological replications in one experiment. Error bars indicated the S.E.M. The efficiency for the zinc finger nuclease-based ObLiGaRe (“AAVS1-int-ZFN”) and Cas9n^{D10A}-FokI (AAVS1-int-C9nF-A″) at the AAVS1-int1 locus were comparable. Variation in ObLiGaRe 2.0 efficiencies across different loci could be due to the efficiency of gRNAs. Obtaining a high gene insertion efficiency is achieved by evaluating a combination of target sites and different spacer lengths.

### Example 4

### Seamless Mutagenesis

[0465] In this Example, a general process for seamless mutagenesis as provided in the disclosure herein is described. The desired result for seamless mutagenesis is shown in FIG. 26, wherein a mutation is made at a target site without changing any sequence in the target.

[0466] Step 1 of the process is shown in FIG. 27. A resistance cassette flanked by homology arms is introduced into a cell with the target sequence and inserted into the target region by homologous recombination. Cells containing the resistance cassette are selected.

[0467] A close-up of the resistance cassette is shown in FIG. 28. A nuclease cutting site and nuclease binding site are present on both sides of the resistance cassette. A nuclease such as Cpf1or Cas9 capable of generating overhangs cleaves at the nuclease cutting site, generating overhangs that include the desired point mutation.

[0468] Step 2 of the process is shown in FIG. 29. In vitro or in vivo ligation uses the compatible overhangs generated by the nuclease to remove the resistance cassette. The point mutation is thus inserted without leaving any “scar,” i.e., any extra sequences. A protocol for nucleic acid digestion and ligation is described in Example 5.

### Example 5

### Protocol for Seamless Mutagenesis using Cpf1

[0469] In this Example, nucleic acid digestion and ligation is performed as follows:

[0470] Digestion
[0471] 1. Add together in a RNase-free 0.5 mL tube:

| | |
|---|---|
| 1 μL | Cas9 10 × Buffer |
| 1 μL | Cpf1 protein (10 μg/μL) |
| 1 μL | gRNA |

Up to 10 μL RNase-free H₂O (this amount is determined by the amount of DNA added in step 3).
[0472] 2. Incubate at room temperature for 5 minutes.
[0473] 3. Add 2-2.5 μg plasmid DNA to be cut (this volume will vary depending on the concentration; adjust the amount of water in step 1 accordingly).
[0474] 4. Incubate at 37° C. for 2 hours.
[0475] 5. After digestion, perform gel electrophoresis with 1.5% agarose gel at 150V.

[0476] Gel Extraction
[0477] 6. Cut the DNA with the appropriate length from the gel.
[0478] 7. Use a Gel Extraction Kit (e.g., from QIAGEN) to extract DNA from the gel.
[0479] 8. Measure the DNA concentration on a NANODROP.

[0480] Ligation
[0481] 9. Add together in a PCR tube:

| | | |
|---|---|---|
| 25-30 | ng | plasmid DNA (this volume will vary |
| | | depending on the concentration) |
| 1 | μL | DTT |
| 1 | μL | 10 × T4 ligase buffer |
| 1 | μL | T4 ligase |

Up to 10 μL H₂O
[0482] 10. Incubate at 16° C. for 2 hours.
[0483] 11. Use 10 μl for transformation.

[0484] Transformation
[0485] 12. Thaw NEB10β cells (NEW ENGLAND BIOLABS) from −80° C. freezer by placing them on ice for 10 minutes. Each vial contains 50 μL (sufficient for 3 transformations). Thaw SOC medium.
[0486] 13. Add 10 μL of the ligation reaction to a 1.5 mL EPPENDORF tube and place on ice to cool down.
[0487] 14. After thawing, add 15 μL NEB10β cells to the ligation reaction.
[0488] 15. Leave on ice for 30 minutes. Warm up 42° C. water bath.
[0489] 16. Heat-shock cells by placing them at 42° C. in the water bath for 30 seconds, and then on ice for 2 minutes.
[0490] 17. Add 300 μL SOC medium to the cells and incubate for 45 minutes at 37° C.
[0491] 18. Plate 100 μL of the cells on ⅓ of a plate, or 300 μL on a whole plate; the plate contains the appropriate antibiotic.

### Example 6

### Cas9 In Vitro Digestion Protocol

[0492] In this Example, in vitro digestion of substrate DNA by Cas9 is performed as follows (for a 30 μL reaction):
[0493] 1. Assemble the reaction at room temperature in the following order:

| | |
|---|---|
| 20 μL | Nuclease-free water |
| 3 μL | 10 × Cas9 Nuclease Reaction Buffer |
| 3 μL | 300 nM sgRNA (30 nM final concentration) |
| 1 μL | 1 μM Cas9 Nuclease (~30 nM final concentration) |

Pre-incubate for 10 minutes at 25° C., then add:

| | |
|---|---|
| 3 μL | 30 nM substrate DNA |

[0494] 2. Mix thoroughly and pulse-spin in a microfuge.
[0495] 3. Incubate at 37° C. for 15 minutes.
[0496] 4. Add 1 μL of Proteinase K to each sample. Mix thoroughly and pulse-spin in a microfuge.
[0497] 5. Incubate at room temperature for 10 minutes.
[0498] 6. Proceed with fragment analysis.

### Example 7

### Analysis of DNA Repair Profiles Following Cas9 Cleavage

[0499] In this Example, computational analysis was used to identify Type II-B Cas9 operons by searching for presence of cas4 in the operon. The Cas9 protein from Francisella novicida (FnCas9) was chosen for production. Nuclease activity was demonstrated in an in vitro cleavage assay as shown in FIG. 34A. Sanger sequencing of cleaved products revealed that FnCas9 generates 5′ cohesive ends in vitro, as shown in FIG. 34B. The protein expression construct was validated in a HEK293 human cell line. RIMA was used to compare mutation patterns in FnCas9 and the Cas9 protein from Streptococcus pyogenes (SpyCas9), as shown in FIG. 34C.

### Example 8

### Analysis of DNA Cut Profiles Following Cas9 Treatment

[0500] A Type II-B Cas9 variant from Francisella novicida (FnCas9) was shown to form cohesive ends with a low editing efficiency in mammalian cells, as described in Example 7. Other members of the Type II-B Cas9 family were tested for generating cohesive ends. A new Cas9 variant from the sequenced gut metagenome MH0245 was identified (MHCas9). Sequences of the guide RNA, tracrRNA, and crRNA designed for MHCas9 are shown in FIG. 33. In vitro assays showed that MHCas9 is capable of cleaving a DNA fragment, as shown in FIG. 35A. Sanger sequencing revealed that MHCas9 generates 5′ overhangs in vitro, as shown in FIG. 35B. Furthermore, a Cell1 assay was performed to validate that MHCas9 is also functional in a HEK293-REMINDEL human cell line, as shown in FIG. 35C.

[0501] The sequence of the crRNA/tracrRNA from MHCas9 is shown in FIG. 36A. A scheme of the crRNA/tracrRNA, indicating the secondary structures, is shown in FIG. 36B. A truncated phylogenetic tree in FIG. 36C shows alignment of MHCas9 with other Type II-B Cas9, including Cas9 from Sulfurospirillum sp. SCADCh (ssCas9), Wolinella succinogenes (WsCas9), Legionella pneumophila (LpCas9) and FnCas9. As indicated by the phylogenetic tree, FnCas9 and MHCas9 are fairly divergent. However, experimental results described in Example 7 and this example show that MHCas9 and FnCas9 share the same mechanism of cleavage.

### Example 9

### Design of sgRNAs

[0502] In this Example, the methodology for design of a sgRNA is described:
[0503] 1. Find the relevant CRISPR operons using Protein BLAST (NCBI, blast.ncbi.nlm.nih.gov/Blast.cgi?PAGE=Proteins). For each of the species appeared in the search, one of the RefSeq is selected for further analysis. BLAST is run several times with various inputs and different settings.
[0504] 2. Check for the CRISPR RNAs (crRNAs) that are already annotated. Otherwise, annotate the crRNAs using CRISPR-Finder (crispr.i2bc.paris-saclay.fr/Server/).
[0505] 3. Find the possible location of tracrRNA using “Create Alignment” in CLC Genomics Workbench v.9.5 (QIGEN). Both strands of the crRNA are aligned to the sequence between Cas4 and the CRISPR repeat sequences.
[0506] 4. Look for a TATAA Box in the vicinity of the regions which show similarity with the crRNA.
[0507] 5. Test the secondary structure of the crRNA with all possible tracrRNAs (found in the alignment) and select the ones that make a desirable structure.
[0508] 6. Trim the crRNA and tracrRNA to make a short guide RNA (sgRNA).

[0509] FIGS. 41A-T illustrate various sgRNAs designed by the method described herein. FIGS. 42A-L illustrate the optimization of sgRNAs (also termed “chimeric gRNA) by trimming, and possible target sites for further modifications.

### Example 10

### In Vitro Digestion Assays of Modified sgRNA

[0510] Four different guide RNA were engineered as outlined in FIG. 45 (guide-1, guide-2, guide-3, guide-4) by removing various nucleotides. The modified guide RNA were then compared to the original guide RNA in an in vitro digestion assay. FIG. 45 demonstrates that some modifications improved the digestion efficiency of MHCas9.

[0511] Guide RNA length was further investigated in three different Cas9 systems: SpyCas9, Cl1Cas9 and MHCas9. Guide RNA of lengths 19-23 were prepared, then the new Cas9 variants and engineered guide RNA were transfected into a reporter cell line and subjected to Surveyor™ nuclease assay (Integrated DNA Technologies, Skokie, Ill.). FIG. 46 demonstrates the cutting efficiency and functionality of new Cas9 variances Cl1 and MH in vitro.

### Example 11

### PAM Sequences for MHCas9

[0512] The preferred PAM sequence for MHCas9 was investigated using the method shown schematically in FIG. 49A. A pooled library of 64 plasmids was generated covering various PAM sequence combinations and a target cleavage site. SpCas9 and MHCas9 were used to separately digest the library. Forward and reverse primers for the plasmid were used to amplify the region containing the target cleavage site and the PAM, and the amplified regions were then sequenced by next-generation sequencing. The plasmids containing the preferred PAM sequences for either SpCas9 or MHCas9 were digested and thus not amplified or sequenced. On the other hand, the plasmids containing non-preferred PAM sequences for SpCas9 or MHCas9 were not digested and could be amplified.

[0513] Results for the “depleted” PAM sequences for SpCas9 and MHCas9 are shown in FIG. 49B. Compared with SpCas9, MHCas9 has a less stringent preference for the “NGG” PAM sequence.

### Example 12

### Coupling Cas9 Proteins with Exonucleases

[0514] Cleavage by Type II-B Cas9 proteins was coupled with an end processing exonuclease enzyme to increase editing efficiency. A schematic of the method is illustrated in FIG. 50. As shown in FIG. 50A, overhangs generated from cleavage by Type II-B Cas9 can be repaired precisely by the cell to revert to the original sequence, thus limiting the editing efficiency when insertion-deletion or substitution modifications are desired. In FIG. 50B, after cleavage by Type II-B Cas9, the end processing exonuclease enzyme Artemis or TREX2 is introduced, which further processes the cleaved overhangs at the Type II-B Cas9 cut site. Cellular repair of these processed ends results in imprecise repair (i.e., increased number of insertion-deletion or substitution modifications) relative to the original sequence, thereby increasing the editing efficiency.

[0515] To test the effects of coupling Cas9 with exonucleases, Type II-B Cas9 with or without an end processing enzyme were tested for activity in human cell lines. FIG. 51A shows a schematic overview of the experimental procedure. Plasmids encoding various Type II-B Cas9 proteins (FnCas9, Cl1Cas9, MHCas9) and the Type II-A SpCas9 were introduced into HEK293 cells, along with plasmids encoding end processing enzymes FnCas4 or TREX2 and plasmids encoding three different guide RNA sequences. Genomic DNA from the HEK293 cells were harvested 72 hours after transfection and analyzed by next-generation sequencing.

[0516] Results are shown in FIG. 51B. Cells transfected with control plasmids showed only background levels of modification (attributed to natural variation in sequencing). FnCas9, MHCas9, and SpCas9 all showed varying amounts of genome modification either in the presence or absence of an end processing enzyme. Generally, introduction of Cas9 with an end processing enzyme showed increased number of modifications relative to no end processing enzyme.

### Example 13

### Mutation Pattern Analysis of Cas9 Proteins

[0517] Mutation pattern analysis for cuts made by different Cas9 was conducted. HEK293 cells were transfected with SpCas9, Cl1Cas9, or MHCas9 and their respective guide RNA's. Cells were lysed after 72 hours, and genomic DNA was extracted and subjected to next-generation amplicon sequencing. Sequencing reads were analyzed using bioinformatic tools to quantify the relative frequency of each mutation among the detected modified reads.

[0518] Results are shown in FIG. 52. FIGS. 52A, 52B, and 52C show the mutation patterns for the same target sequence after inducing a cut using, respectively, SpCas9, Cl1Cas9, and MHCas9. The target sequence is shown at the top of each of the panels. These results indicate that mutation patterns at the same locus after inducing a cut using different Cas9 protein are different, indicating different modes nuclease activity for different Cas9s.

[0519] One non-limiting hypothesis for the difference in nuclease activity may be that the RuvC and HNH nuclease domain configurations differ between Type II-A and Type II-B Cas9 proteins. As illustrated in FIG. 53, a Type II-A Cas9 (panel A) indicates the same cut site for its RuvC and HNH domains (e.g., approximately 3 nucleotides upstream of the NGG PAM sequence), which leads to blunt ends or a single nucleotide overhang. On the other hand, a Type II-B Cas9 (panel B) indicates offset cut sites for RuvC and HNH (e.g., approximately 7 and 3 nucleotides, respectively, upstream of the NGG PAM sequence), which results in “sticky” ends, i.e., a 3-4 nucleotide overhang.

The application's sequence listing, which the Patent Office published only in electronic form, follows.

SEQUENCE LISTING (290 sequences)

SEQ ID NO: 1 - protein, 7 aa, Simian virus 40
PKKKRKV

SEQ ID NO: 2 - protein, 20 aa, Unknown
  source: /note="Description of Unknown: NLS peptide"
AVKRPAATKKAGQAKKKKLD

SEQ ID NO: 3 - protein, 9 aa, Unknown
  source: /note="Description of Unknown: C-myc NLS sequence"
PAAKRVKLD

SEQ ID NO: 4 - protein, 25 aa, Unknown
  source: /note="Description of Unknown: NLS peptide"
MSRRRKANPTKLSENAKKLAKEVEN

SEQ ID NO: 5 - protein, 9 aa, Unknown
  source: /note="Description of Unknown: NLS peptide"
KLKIKRPVK

SEQ ID NO: 6 - protein, 5 aa, Saccharomyces cerevisiae
KIPIK

SEQ ID NO: 7-9 - skipped (3 entries)

SEQ ID NO: 10 - protein, 1422 aa, Sutterella wadsworthensis
MTQSERRFSCSIGIDMGAKYTGVFYALFDREELPTNLNSKAMTLVMPETGPRYVQAQRTAVRHRLRGQKRYTLARKLAFLVVDDMIKKQEKRLTDEEWKRGREALSGLLKRRGYSRPNADGEDLTPLENVRADVFAAHPAFSTYFSEVRSLAEQWEEFTANISNVEKFLGDPNIPADKEFIEFAVAEGLIDKTEKKAYQSALSTLRANANVLTGLRQMGHKPRSEYFKAIEADLKKDSRLAKINEAFGGAERLARLLGNLSNLQLRAERWYFNAPDIMKDRGWEPDRFKKTLVRAFKFFHPAKDQNKQHLELIKQIENSEDIIETLCTLDPNRTIPPYEDQNNRRPPLDQTLLLSPEKLTRQYGEIWKTWSARLTSAEPTLAPAAEILERSTDRKSRVAVNGHEPLPTLAYQLSYALQRAFDRSKALDPYALRALAAGSKSNKLTSARTALENCIGGQNVKTFLDCARRYYREADDAKVGLWFDNADGLLERSDLHPPMKKKILPLLVANILQTDETTGQKFLDEIWRKQIKGRETVASRCARIETVRKSFGGGFNIAYNTAQYREVNKLPRNAQDKELLTIRDRVAETADFIAANLGLSDEQKRKFANPFSLAQFYTLIETEVSGFSATTLAVHLENAWRMTIKDAVINGETVRAAQCSRLPAETARPFDGLVRRLVDRQAWEIAKRVSTDIQSKVDFSNGIVDVSIFVEENKFEFSASVADLKKNKRVKDKMLSEAEKLETRWLIKNERIKKASRGTCPYTGDRLAEGGEIDHILPRSLIKDARGIVFNAEPNLIYASSRGNQLKKNQRYSLSDLKANYRNEIFKTSNIAAITAEIEDVVTKLQQTHRLKFFDLLNEHEQDCVRHALFLDDGSEARDAVLELLATQRRTRVNGTQIWMIKNLANKIREELQNWCKTTNNRLHFQAAATNVSDAKNLRLKLAQNQPDFEKPDIQPIASHSIDALCSFAVGSADAERDQNGFDYLDGKTVLGLYPQSCEVIHLQAKPQEEKSHFDSVAIFKEGIYAEQFLPIFTLNEKIWIGYETLNAKGERCGAIEVSGKQPKELLEMLAPFFNKPVGDLSAHATYRILKKPAYEFLAKAALQPLSAEEKRLAALLDALRYCTSRKSLMSLFMAANGKSLKKREDVLKPKLFQLKVELKGEKSFKLNGSLTLPVKQDWLRICDSPELADAFGKPCSADELTSKLARIWKRPVMRDLAHAPVRREFSLPAIDNPSGGFRIRRTNLFGNELYQVHAINAKKYRGFASAGSNVDWSKGILFNELQHENLTECGGRFITSADVTPMSEWRKVVAEDNLSIWIAPGTEGRRYVRVETTFIQASHWFEQSVENWAITSPLSLPASFKVDKPAEFQKAVGTELSELLGQPRSEIFIENVGNAKHIRFWYIVVSSNKKMNESYNNVSKS

SEQ ID NO: 11 - protein, 1125 aa, Francisella tularensis
MNVKILPIAIDLDVKNTGVFSAFYQKGTSLEKLDNKNGKVYELSKDSYTLLMNNRTARRHQRRGIDRKQLVKRLFKLVWTEQLNLEWDKDTQQAISFLFNRRGFSFITDGYSTEYLNIVPEQVKAILMDIFDDYNGEDDLDSYLKLATEQESKISEIYNKLMQKILEFKLRKLCTDIKDDKVSTKTLKEITSYEFELLADYLANYSESLKIQKFSYTDKQGNLKELSYYHHDKYNIQEFLKRHATINDEILDTLLTDDFDIWNFNFEKFDFDKNEEKLQNQEDKDHTQAHLHHFVFAVNKIKSEMASGGRHRSQYFQEITNVLDENNHQEGYLKNFCENLHNKKYSNLSVKNLVNLVGNLSNLELKPLRKYFNDKIHAKADHWDEQKFTETYCHWILGEWRVGVKDQDKKDGAKYSYKDLCNELKQKVTKAGLIDFLLELDPCRTIPPYLDNNNRKPPKCQSLILNPKFLDNQYPNWQQYLQELKKLQSIQDYLDSFETDLKDLKSSKDQPYFVEYKSSNQQMASGQRDYKDLDARILQFIFDRVKASDELLLNEIYFQAKKLKQKASSELEKLESSKKLDEVIANSQLSQILKSQHTNGIFEQGTFLHLVCKYYKQRQRARDSRLYIMPEYRYDKKLDKYNNTGRFDDNNQLLTYCNHKPRQKRYQLLNDLAGVLQVSRNQLLSSVEEWFQQAQRVGEISKSQDEQIFEWLKSFKIASYCKAAVEMQKQYRGTLKNAIQTAIFRQSENINKNKNKNTGNQQQALSENSKDVKSLTADEKKLLKLIENIAKASQKIGESLGLNDKQIKKFNSIYSFAQIQQIAFAERKGNANTCAVCSADNAHRMQQIKITELVEDNKDNIILSAKAQRLPAIPTRIVDGAVKKMATILAKNIVDDNWQNIKQVLSAKHQLHIPIITESNAFEFEPALADVKGKSLKDRRKKALERISPENIFKDKNNRIKEFAKGISAYSGANLTDGDFDGAKEELDHIIPRSHKKYGTLNDEANLICVTRDDNKNIFAIDTSKWFEIETPSDLRDIGVATIQYKIDNNSRPKVRVKLDYVIDDDSKINYFMNHSLLKSRYPDKVLEILKQSTIIEFESSGFNKTIKEMLGMTLAGIYNETSNN

SEQ ID NO: 12 - protein, 1123 aa, Francisella tularensis
MNVKILPIAIDLDVKNTGVFSAFYQKGTSLEKLDNKNGKVYELSKDSYTLLMNNRTARRHKRRGIDRKQLVKRLFKLVWTEQLNLEWDKDTQQAISFLFNRRGFSFITDGYSTEYLNIVPEQVKAILMDIFDDYNGEDDLDSYLKLATEQESKISEIYNKLMQKILEFKLRKLCTDIKDDKVSTKTLKEITSYEFELLADYLANYSESLKTQKFSYTDKQGNLKELSYYHHDKYNIQEFLKRHATINDEILGTLLTDDFDIWNFNFEKFDFDKNEEKLQNQEDKDHTQAHLHHFVFVVNKIKSEMASGGRHRSQYFQEITNVLDENNHQEGYLKNFCENLHNKKYSNLSVKNLVNLVGNLSNLELKPLRKYFNDKIHAKADHWDEQKFTETYCHWILGEWRVGVKDQDKKDGAKYSYKDLCNELKQKVTKAGLIDFLLELDPCRTIPPYLDNNNRKPPKCQSLILNPKFLDNQYPNWQQYLQELKKLQSIQDYLDSFETDLKDLKSSKDQPYFVEYKSSNQQMASGQRDYKDLDARILQFIFDRVKASDELLLNEIYFQAKKLKQKASSELEKLESSKKLDEVIANSQLSQILKSQHTNGIFEQGTFLHLVCKYYKQRQRARDSRLYIMPEYRYDKKLDKYNNTGRFDDNNQLLTYCNHKPRQKRYQLLNDLAGVLQVSRNQLLSSVEEWFQQAQRVGEISKSQDEQIFEWLKSFKIASYCKAAVEMQKQYRGTLKNAIQTAIFRQSENINKNKNTGNQQQALSENSKDVKSLTADEKKLLKLIENIAKASQKIGESLGLNDKQIKKFNSIYSFAQIQQIAFAKRKGNANTCAVCSADNAHRMQQIKITELVEDNKDNIILSAKAQRLPAIPTRIVDGAVKKMATILAKNIVDDNWQNIKQVLSAKHQLHIPIITESNAFEFEPALADVKGKSLKDRRKKALERISPENIFKDKNNRIKEFAKGISAYSGANLTDGDFDGAKEELDHIIPRSHKKYGTLNDEANLICVTRDDNKNIFAIDTSKWFEIETPSDLRDIGVATIQYKIDNNSRPKVRVKLDYVIDDDSKINYFMNHSLLKSRYPDKVLEILKQSTIIEFESSGFNKTIKEMLGMTLAGIYNETSNN

SEQ ID NO: 13 - protein, 1123 aa, Francisella tularensis; identical to SEQ ID NO: 12

SEQ ID NO: 14 - protein, 1150 aa, Sutterella wadsworthensis
MRPISMKDRGWEPDRFKKTLVRAFKFFHPAKDQNKQHLELIKQIENSEDIIETLCTLDPNRTIPPYEDQNNRRPPLDQTLLLSPEKLTRQYGEIWKTWSARLTSDEPTLAPAAEILERSTDRKSRVAVNGHEPQPTLAYQLSYALQRAFDRSKALDPYALRALAAGSKSNKLTSARTALENCIGGQNVEKFLDCARRYYREADDAKVGLWFDNAEGLLERSDLHPPMKKKILPLLVANILQTDETTGQKFLDEIWRKQIKGRETVASRCARIETVRKSFGGGFNIAYNTAQYREVNKLPRNAQDKELLIIRDRVAETADFIAANLGLSDEQKRKFANPFSLAQFYTLIETEVSGFSATTLAVHLENAWRMTIKDAVINGETVRAAQCSRLPAETARPFDGLVRRLVDRQAWEIAKRASTDIQSKVDFSNGIVDVSIFVEENKFEFSASVADLKKNKRVKDKMLSEAEKLETRWLNKNERIKKASRETCPYTGDRLAEGGEIDHILPRSLIKDARGIVFNAEPNLIYASSRGNQLKKNQRYSLSKLDPDYLNKVFKTSNIAAITAEIEDVVTKLQQTHRLKFFDLLNEHEQDCVRHALFLDDGSEARNAVLELLATQRRTRVNGTQIWMIKSLANKIREELQDWCRTTNNRLHFQAAATDVSTAKNLRLKLAQNQPNFEKPDIQPIASHSIDALCSFAVGSADAERDQDGFDYLDGKAVLGLYPQSCEVIRLQAKPQEEKSHFDSVAIFKEGIYAEQFLPIFTLNGRIWIGYETLDSKGERCGAIEVSGKKPEELLSMLAPFFNKPVGDLSAHATYRIQKKPAYEFLAKAALQPLSAEEKRLAALLDALRYCTSRKSLKSFFMAANGKSLKKREDLLKPKLFQLKVELKGEKAFKLNGSLTLPMKQDWLRICNSPELADAFGNPCSADELTSKLAQIWKRPVMRDLAHAPVRREFSLPVIDNPSGGFRIRRTNLFGNELYQVHAINAKKYRGFASADSNVDWANGILFNELQHENLTECCGRFITSADVTPMSEWRKVVTEDNLRIWIAPGTEGRRYVRVETTFIQASHWFEQSVENWAITSPLSLPASFKVDKPAEFQKAVGTELSELLGQPRSEIFIESVGNAKHIRFWYIVVSSNKKMNESYNNASKS

SEQ ID NO: 15 - protein, 1125 aa, Francisella tularensis; identical to SEQ ID NO: 11

SEQ ID NO: 16 - protein, 1372 aa, Legionella pneumophila
MESSQILSPIGIDLGGKFTGVCLSHLEAFAELPNHANTKYSVILIDHNNFQLSQAQRRATRHRVRNKKRNQFVKRVALQLFQHILSRDLNAKEETALCHYLNNRGYTYVDTDLDEYIKDETTINLLKELLPSESEHNFIDWFLQKMQSSEFRKILVSKVEEKKDDKELKNAVKNIKNFITGFEKNSVEGHRHRKVYFENIKSDITKDNQLDSIKKKIPSVCLSNLLGHLSNLQWKNLHRYLAKNPKQFDEQTFGNEFLRMLKNFRHLKGSQESLAVRNLIQQLEQSQDYISILEKTPPEITIPPYEARTNTGMEKDQSLLLNPEKLNNLYPNWRNLIPGIIDAHPFLEKDLEHTKLRDRKRIISPSKQDEKRDSYILQRYLDLNKKIDKFKIKKQLSFLGQGKKLPANLIETQKEMETHFNSLLVSVLIQIASAYNKEREDAAQGIWFDNAFRLCELSNINPPRKQKILPLLVGAILSEDFINNKDKWAKFKNFWNTHKIGRTSLKSKCKEIEEARKNSGNAFKIDYEEALNHPEHSNNKALIKIIQTIPDIIQAIQSHLGHNDSQALIYHNPFSLSQLYTILETKRDGFHKNCVAVTCENYWRSQKTEIDPEISYASRLPADSVRPFDGVLARMMQRLAYEIAMAKWEQIKHIPDNSSLLIPIYLEQNRFEFEESFKKIKGGSSDKTLEQAIEKQNIQWEEKFQRIINASMNICPYKGASIGGQGEIDHIYPRSLSKKHFGVIFNSEANLIYCSSQGNREKKEEHYLLEHLSPLYLKHQFGTDNVSDIKNFISQNVANIKKYISFHLLTPEQQKAARHALFLDYDDEAFKTITKFLMSQQKARVNGTQKFLGKQIMEFLSTLADSKQLQLEFSIKQITAEEVHDHRELLSKQEPKLVKSQQQSFPSHAIDATLTMSIGLKEFPQFSQELDNSWFINHLMPDEVHLNPVRSKEKYNKPNISSTPLFKDSLYAERFIPVWVKGETFAIGFSEKDLFEIKPSNKEKLFTLLKTYSTKNPGESLQELQAKSKAKWLYFPINKTLALEFLHHYFHKEIVTPDDTTVCHFINSLRYYTKKESITVKILKEPMPVLSVKFESSKKNVLGSFKHTIALPATKDWERLFNHPNFLALKANPAPNPKEFNEFIRKYFLSDNNPNSDIPNNGHNIKPQKHKAVRKVFSLPVIPGNAGTMMRIRRKDNKGQPLYQLQTIDDTPSMGIQINEDRLVKQEVLMDAYKTRNLSTIDGINNSEGQAYATFDNWLTLPVSTFKPEIIKLEMKPHSKTRRYIRITQSLADFIKTIDEALMIKPSDSIDDPLNMPNEIVCKNKLFGNELKPRDGKMKIVSTGKIVTYEFESDSTPQWIQTLYVTQLKKQP

SEQ ID NO: 17 - protein, 1372 aa, Legionella pneumophila
MESSQILSPIGIDLGGKFTGVCLSHLEAFAELPNHANTKYSVILIDHNNFQLSQAQRRATRHRVRNKKRNQFVKRVALQLFQHILSRDLNAKEETALCHYLNNRGYTYVDTDLDEYIKDETTINLLKELLPSESEHNFIDWFLQKMQSSEFRKILVSKVEEKKDDKELKNAVKNIKNFITGFEKNSVEGHRHRKVYFENIKSDITKDNQLDSIKKKIPSVCLSNLLGHLSNLQWKNLHRYLAKNPKQFDEQTFGNEFLRMLKNFRHLKGSQESLAVRNLIQQLEQSQDYISILEKTPPEITIPPYEARTNTGMEKDQSLLLNPEKLNNLYPNWRNLIPGIIDAHPFLEKDLEHTKLRDRKRIISPSKQDEKRDSYILQRYLDLNKKIDKFKIKKQLSFLGQGKQLPANLIETQKEMETHFNSSLVSVLIQIASAYNKEREDAAQGIWFDNAFSLCELSNINPPRKQKILPLLVGAILSEDFINNKDKWAKFKIFWNTHKIGRTSLKSKCKEIEEARKNSGNAFKIDYEEALNHPEHSNNKALIKIIQTIPDIIQAIQSHLGHNDSQALIYHNPFSLSQLYTILETKRDGFHKNCVAVTCENYWRSQKTEIDPEISYASRLPADSVRPFDGVLARMMQRLAYEIAMAKWEQIKHIPDNSSLLIPIYLEQNRFEFEESFKKIKGSSSDKTLEQAIEKQNIQWEEKFQRIINASMNICPYKGASIGGQGEIDHIYPRSLSKKHFGVIFNSEVNLIYCSSQGNREKKEEHYLLEHLSPLYLKHQFGTDNVSDIKNFISQNVANIKKYISFHLLTPEQQKAARHALFLDYDDEAFKTITKFLMSQQKARVNGTQKFLGKQIMEFLSTLADSKQLQLEFSIKQITAEEVHDHRELLSKQEPKLVKSRQQSFPSHAIDATLTMSIGLKEFPQFSQELDNSWFINHLMPDEVHLNPVRSKEKYNKPNISSTPLFKDSLYAERFIPVWVKGETFAIGFSEKDLFEIKPSNKEKLFTLLKTYSTKNPGESLQELQAKSKAKWLYFPINKTLALEFLHHYFHKEIVTPDDTTVCHFINSLRYYTKKESITVKILKEPMPVLSVKFESSKKNVLGSFKHTIALPATKDWERLFNHPNFLALKANPAPNPKEFNEFIRKYFLSDNNPNSDIPNNGHNIKPQKHKAVRKVFSLPVIPGNAGTMMRIRRKDNKGQPLYQLQTIDDTPSMGIQINEDRLVKQEVLMDAYKTRNLSTIDGINNSEGQAYATFDNWLTLPVSTFKPEIIKLEMKPHSKTRRYIRITQSLADFIKTIDEALMIKPSDSIDDPLNMPNEIVCKNKLFGNELKPRDGKMKIVSTGKIVTYEFESDSTPQWIQTLYVTQLKKQP

SEQ ID NO: 18 - protein, 1629 aa, Francisella tularensis
MNFKILPIAIDLGVKNTGVFSAFYQKGTSLERLDNKNGKVYELSKDSYTLLMNNRTARRHQRRGIDRKQLVKKLFKLIWTEQLNLEWDKDTQQAISFLFNRRGFSFITDGYSPEYLNIVPEQVKAILMDIFDDYNGEDDLDSYLKLATEQESKISEIYNKLMQKILEFKLRKLCTDIKDDKVSTKTLKEITSYEFELLADYLANYSESLKTQKFSYTDKQGNLKELSYYHHDKYNIQEFLKRHATINDEILDTLLTDDLDIWNFNFEKFDFDKNEEKLQNQEDKDHTQAHLHHFVFAVNKIKSEMASGGRHRGQYFQEITNVLDENNHQEGYLKNFCENLHNKKYSNLSVKNLVNLIGNLSNLELKPLRKYFNDKIHAKADHWDEQKFTETYCHWILGEWRVGLKDQDKKEGAKYSYKDLCNELKQKVTNAGLIDFLLELDPCRTIPPYLDNNNRKPPKCQSLILNPKFLDNQYPNWQQYLQELKKLQIIQDYLESFETDLKVLKSSKDQPYFVEYKSSNQQIASGQRDYKDLDARILQFIFDRVKASDELLLNEIYFQAKKLKQKASSELEKLESSKKLDEVIANSQLSKILKSQHTNGIFEQGTFLHLVCKYYKQRQRARDSRLYIMPEYRYDKKLDKYNNTGRFDDDNQLLTYCNHKPRQKRYQLLNDLAGVLQVSPNFLKDKIGSDDDLFISKWLVEHIRGFKKACEDSLKIQKDNRGLLNHKINIARNTKGKCEKEIFNLICKIEGSEDKKGNYKHGLAYELGVLLFGEPNEASKPEFDRKIKKFNSIYSFAQIQQIAFAERKGNANTCAVCSADNAHRMQQIKITEPVEDNKDKIILSAKAQRLPAIPTRIVDGAVKKMATILAKNIVDDNWQNIKQVLSAKHQLHIPIITESNAFEFEPALADVKGKSLKDRRKKALERISPENIFKDKNNRIKEFAKGISAYSGANLTDGDFDGAKEELDHIIPRSHKKYGTLNDEANLICVTRDDNKNKGNRIFCLHDLANNYKLKQFETTDDLEIEKKIADTIWDASKKDFKFGNYRSFINLTPQEQKAFRHALFLADENPIKQAVIRAINNRNRTFVNGTQRYFAEVLANNIYLRAKKENLNTDKISFDYFGIPTIGNGRGIAEIRQLYEKVDSDIQVYAKGDKPQASYSHLIDAMLAFCIAADEHRNDGSIGLEIDKNYSLYPLDKNTGEVFTKDIFSQIKITDNEFSDKKLVRKKATEGFNTHRQMTRDGIYAENYLPILIHKELDEVRKGYTWKNSEEIKIFKGKKYDIQQLNNLLYCLKFVDKPISIDIQISTLEELRNILTTNNIAATAEYYYINLKTQKLHEYYIENYNTALGYKKYTKEMEFLRSLAYRSERVKIKSIDDVKQVLDKDSNFIIGKITLPFKKEWQRLYREWQNTTIKDDYEFLKSFFNVKSITKLHKKVRKDFSLPISTNEGKFLVKRKTWDNNFIYQILNDSDSRVDGTKPFIPAFDISKNEIVEAIIDSFTSKNIFWLPKNIELQKVDNKNIFAIDTSKWFEVETPSDLRDIGVATIQYKIDNNSRPKVRVKLDYVIDDDSKINYFTNHSLLKSRYPDKVLEILKQSTIIEFESSGFNKTIKEMLGMTLAGIYNETSNN

SEQ ID NO: 19 - protein, 1372 aa, Legionella pneumophila; identical to SEQ ID NO: 17

SEQ ID NO: 20 - protein, 1372 aa, Legionella pneumophila; identical to SEQ ID NO: 17

SEQ ID NO: 21 - protein, 1372 aa, Legionella pneumophila; identical to SEQ ID NO: 17

SEQ ID NO: 22 - protein, 1372 aa, Legionella pneumophila; identical to SEQ ID NO: 16

SEQ ID NO: 23 - protein, 1372 aa, Legionella pneumophila; identical to SEQ ID NO: 16

SEQ ID NO: 24 - protein, 1629 aa, Francisella tularensis
MNFKILPIAIDLGVKNTGVFSAFYQKGTSLERLDNKNGKVYELSKDSYTLLMNNRTARRHQRRGIDRKQLVKRLFKLIWTEQLNLEWDKDTQQAISFLFNRRGFSFITDGYSPEYLNIVPEQVKAILMDIFDDYNGEDDLDSYLKLATEQESKISEIYNKLMQKILEFKLMKLCTDIKDDKVSTKTLKEITSYEFELLADYLANYSESLKTQKFSYTDKQGNLKELSYYHHDKYNIQEFLKRHATINDRILDTLLTDDLDIWNFNFEKFDFDKNEEKLQNQEDKDHIQAHLHHFVFAVNKIKSEMASGGRHRSQYFQEITNVLDENNHQEGYLKNFCENLHNKKYSNLSVKNLVNLIGNLSNLELKPLRKYFNDKIHAKADHWDEQKFTETYCHWILGEWRVGVKDQDKKDGAKYSYKDLCNELKQKVTKAGLVDFLLELDPCRTIPPYLDNNNRKPPKCQSLILNPKFLDNQYPNWQQYLQELKKLQSIQNYLDSFETDLKVLKSSKDQPYFVEYKSSNQQIASGQRDYKDLDARILQFIFDRVKASDELLLNEIYFQAKKLKQKASSELEKLESSKKLDEVIANSQLSQILKSQHTNGIFEQGTFLHLVCKYYKQRQRARDSRLYIMPEYRYDKKLHKYNNTGRFDDDNQLLTYCNHKPRQKRYQLLNDLAGVLQVSPNFLKDKIGSDDDLFISKWLVEHIRGFKKACEDSLKIQKDNRGLLNHKINIARNTKGKCEKEIFNLICKIEGSEDKKGNYKHGLAYELGVLLFGEPNEASKPEFDRKIKKFNSIYSFAQIQQIAFAERKGNANTCAVCSADNAHRMQQIKITEPVEDNKDKIILSAKAQRLPAIPTRIVDGAVKKMATILAKNIVDDNWQNIKQVLSAKHQLHIPIITESNAFEFEPALADVKGKSLKDRRKKALERISPENIFKDKNNRIKEFAKGISAYSGANLTDGDFDGAKEELDHIIPRSHKKYGTLNDEANLICVTRGDNKNKGNRIFCLRDLADNYKLKQFETTDDLEIEKKIADTIWDANKKDFKFGNYRSFINLTPQEQKAFRHALFLADENPIKQAVIRAINNRNRTFVNGTQRYFAEVLANNIYLRAKKENLNTDKISFDYFGIPTIGNGRGIAEIRQLYEKVDSDIQAYAKGDKPQASYSHLIDAMLAFCIAADEHRNDGSIGLEIDKNYSLYPLDKNTGEVFTKDIFSQIKITDNEFSDKKLVRKKAIEGFNTHRQMTRDGIYAENYLPILIHKELNEVRKGYTWKNSEEIKIFKGKKYDIQQLNNLVYCLKFVDKPISIDIQISTLEELRNILTTNNIAATAEYYYINLKTQKLHEYYIENYNTALGYKKYSKEMEFLRSLAYRSERVKIKSIDDVKQVLDKDSNFIIGKITLPFKKEWQRLYREWQNTTIKDDYEFLKSFFNVKSITKLHKKVRKDFSLPISTNEGKFLVKRKTWDNNFIYQILNDSDSRADGTKPFIPAFDISKNEIVEAIIDSFTSKNIFWLPKNIELQKVDNKNIFAIDTSKWFEVETPSDLRDIGIATIQYKIDNNSRPKVRVKLDYVIDDDSKINYFMNHSLLKSRYPDKVLEILKQSTIIEFESSGFNKTIKEMLGMKLAGIYNETSNN

SEQ ID NO: 25 - protein, 1629 aa, Francisella tularensis
MNVKILPIAIDLGVKNTGVFSAFYQKGTSLERLDNKNGKVYELSKDSYTLLMNNRTARRHQRRGIDRKQLVKRLFKLIWTEQLNLEWDKDTQQAISFLFNRRGFSFITDGYSPEYLNIVPEQVKAILMDIFDDYNGEDDLDSYLKLATEQESKISEIYNKLMQKILEFKLRKLCTDIKDDKVSTKTLKEITSYEFELLADYLANYSEILKTQKFSYTDKQGNLKELSYYHHDKYNIQEFLKRHATINDEILDTLLTDDLDIWNFNFEKFDFDKNEEKLQNQEDKDHTQAHLHHFVFAVNKIKSEMASGGRHRGQYFQEITNVLDENNHQEGYLKNFCENLHNKKYSNLSVKNLVNLIGNLSNLELKPLRKYFNDKIHAKADHWDEQKFTETYCHWILGEWRVGVKDQDKKDGAKYSYKDLCNELKQKVTKAGLVDFLLELDPCRTIPPYLDNNNRKPPKCQSLILNPKFLDNQYPNWQQYLQELKKLQSIQNYLESFETDLKVLKSSKDQPYFVEYKSSNQQIASGQRDYKDLDARILQFIFDRVKASDELLLNEIYFQAKKLKQKASSELEKLESSKKLDEVIANSQLSQILKSQHTNGIFEQGTFLHLVCKYYKQRQRARDSRLYIMPEYRYDKKLDKYNNTGRFDDDNQLLTYCNHKPRQKRYQLLNDLAGVLQVSPNFLKDKIGSDDDLFISKWLVEHIRGFKKACEDSLKIQKDNRGLLNHKINIARNTKGKCEKEIFNLICKIEGSEDKKGNYKHGLAYELGVLLFGEPNEASKPEFDRKIKKFNSIYSFAQIQQIAFAERKGNANSCAVCSADNAHRMQQIKITEPVEDNKDKIILSAKAQRLPAIPTRIVDGAVKKMATILAKNIVDDNWQNIKQVLSAKHQLHIPIITESNAFEFEPALADVKGKSIKDRRKKALERISPENIFKDKNNRIKEFAKGISAYSGDNLASGDFDGAKEELDHIIPRSHKKYGTLNDEANLICVTRDDNKNKGNRIFCLHDLANNYKLKQFETTDDLEIEKKIADTIWDASKKDFKFGNYRSFINLTPQEQKAFRHALFLADENPIKQAVIRAINNRNRTFVNGTQRYFAEVLANNIYLRAKKENLNTDKISFDYFGIPTIGNGRGIAEIRQLYEKVDSDIQAYAKGDKPQASYSHLIDAMLAFCIAADEHRNDGSIGLEIDKNYSLYPLDKNTGEVFTKDIFSQIKITNNEFSDKKLVRKKATEGFNTHRQMTRDGIYAENYLPILIHKELDEVRKGYTWGNSEELKIHKGKKYDIQQLNNLVYCLKFIDKSISIDIQISTLEELRNILTTNNIATTAEYYYINLKTQKLHEYYIENYNTALGYKKYTKEMEFLRSLAYRSERVKIKSIDDVKQVLDKDSNFIIGKITLPFKKEWQRLYREWQNTTIKDDYEFLKSFFNVKSITKLHKKVRKDFSLPISTNEGKFLVKRKTWDNNFIYQILNDSDSRVDGTKPFIPAFDISKNEIVEAIIDSFTSKNIFWLPKNIELQKVDNKNIFAIDTSKWFEVETPSDLRDIGVATIQYKIDNNSRPKVRVKLDYVIDDDSKINYFTNHSLLKSRYPDKVLEILKQSTIIEFESSGFNKTIKEMLGMTLAGIYNETSNN

SEQ ID NO: 26 - protein, 1123 aa, Francisella tularensis; identical to SEQ ID NO: 12

SEQ ID NO: 27 - protein, 393 aa, Francisella tularensis
MNVKILPIAIDLDVKNTGVFSAFYQKGTSLEKLDNKNGKVYELSKDSYTLLMNNRTAQRHQRRGIDRKQLVKRLFKLVWTEQLNLEWDKDTQQAISFLFNRRGFSFITDGYSTEYLNIVPEQVKAILMDIFDDYNGEDDLDSYLKLATEQESKISEIYNKLMQKILEFKLRKLCTDIKDDKVSTKTLKEITSYEFELLADYLANYSESLKTQKFSYTDKQGNLKELSYYHHDKYNIQEFLKRHATINDEILDTLLTDDFDIWNFNFEKFDFDKNEEKLQSQEDKDHTQAYFHHFVFAVNKIKSEMASGGRHRSQYFQEITNVLDENNHQEGYLKNFCENLHNKKYSNLSVKNLVNLVGNLSNLELKPLRKYFNDKNLIIGMSKSLQKLIATGY

SEQ ID NO: 28 - protein, 957 aa, Legionella pneumophila
METHFNSSLVSVLIQIASAYNKEREDAAQGIWFDNAFSLCELSNINPPRKQKILPLLVGAILSEDFINNKDKWAKFKIFWNTHKIGRTSLKSKCKEIEEARKNSGNAFKIDYEEALNHPEHSNNKALIKIIQTIPDIIQAIQSHLGHNDSQALIYHNPFSLSQLYTILETKRDGFHKNCVAVTCENYWRSQKTEIDPEISYASRLPADSVRPFDGVLARMMQRLAYEIAMAKWEQIKHIPDNSSLLIPIYLEQNRFEFEESFKKIKGSSSDKTLEQAIEKQNIQWEEKFQRIINASMNICPYKGASIGGQGEIDHIYPRSLSKKHFGVIFNSEVNLIYCSSQGNREKKEEHYLLEHLSPLYLKHQFGTDNVSDIKNFISQNVANIKKYISFHLLTPEQQKAARHALFLDYDDEAFKTITKFLMSQQKARVNGTQKFLGKQIMEFLSTLADSKQLQLEFSIKQITAEEVHDHRELLSKQEPKLVKSRQQSFPSHAIDATLTMSIGLKEFPQFSQELDNSWFINHLMPDEVHLNPVRSKEKYNKPNISSTPLFKDSLYAERFIPVWVKGETFAIGFSEKDLFEIKPSNKEKLFTLLKTYSTKNPGESLQELQAKSKAKWLYFPINKTLALEFLHHYFHKEIVTPDDTTVCHFINSLRYYTKKESITVKILKEPMPVLSVKFESSKKNVLGSFKHTIALPATKDWERLFNHPNFLALKANPAPNPKEFNEFIRKYFLSDNNPNSDIPNNGHNIKPQKHKAVRKVFSLPVIPGNAGTMMRIRRKDNKGQPLYQLQTIDDTPSMGIQINEDRLVKQEVLMDAYKTRNLSTIDGINNSEGQAYATFDNWLTLPVSTFKPEIIKLEMKPHSKTRRYIRITQSLADFIKTIDEALMIKPSDSIDDPLNMPNEIVCKNKLFGNELKPRDGKMKIVSTGKIVTYEFESDSTPQWIQTLYVTQLKKQP

SEQ ID NO: 29 - protein, 1629 aa, Francisella tularensis; identical to SEQ ID NO: 18

SEQ ID NO: 30 - protein, 1372 aa, Legionella pneumophila; identical to SEQ ID NO: 17

SEQ ID NO: 31 - protein, 1123 aa, Francisella tularensis; identical to SEQ ID NO: 12

SEQ ID NO: 32 - protein, 1125 aa, Francisella tularensis; identical to SEQ ID NO: 11

SEQ ID NO: 33 - protein, 1410 aa, Sulfurospirillum sp.
MASLISLDLGGKNTGFFSFTAKDVSIIDTFQSGTIIYDESFVLSQVARRGKRHGKRNNLRNTLVKRLFLLLLQKHYGLSLDFLPDEILGLFNKRGYTYASFEIKEDEKENLESDILKEFLNDKLNYTIQNDDEVEEFLNQIASNEETFKNYKKDFENLFGASTHQPKKQIELIDEIKKDLEKEDAKELLDGLKVIKKIIDEFHKQQNQGNLPRAKYFEELYLEIEYNLKIQKFFTCNHLHINDMQYLIGNLSNYQLKELRRYFNDEAMAKEDFWSCEKLHRITWRFIQSWHPKSPEDKQRQKENLANLKTKSIIEFLTTTNPLMTIPPYDDMNNRGAVKCQTLRLNEEYLDKHLPHWRAIAHTLASETQKENLEGVTVKGYSEDSTLLHRILDTSSIIDPYRLRSDEIDSYCDVLTKDNAFALKKFAKEYYQLVKEKVRTGIWTKDDDMFKKCDHNPPHKNNQIHNLVAGILGKPIAKERFEAFENELWNVKFGNKKLSSYCKNIEEFRKSNGNLFKQIVELGEDKEVQKYQKELNEWVRKIGEFFNIETPYRARFNNLFSMAQLHTIIDTTRSGFNATCKWCSCENQYRASTRIEIDEQTGEITTNANCQRLPADTQRPFSGKIERYIDKLGYEIAKVKAKELEGIKEDTIDLKIILEQNAFAYEESIRNAKIKNANAKAKKALEEAQKRGLKNIEDKTKRIKDFSNSICPYCGQSLGEDGEIDHILSRSYTLKKYDTVFNSEGNLLYVHQKCNQAKLAKTDYSLQDLKIDISQKWIEEQIATIKTYKTFSVLTQEQQKAFKYALFLDNSNEAYQKVISWLRTDQSSRVNGTQKYLAKKIQEKLKAMFPAKTFNFEFILADANDVHDLRIKAYQLPEKPKDSKQETYSHTIDAVMSLVSVWDKVLPKTEKPTKEDILKFANVENWSALNNEFLTKGKSANQKIEEMIQANDFGQKNMRQVFSKPIFKDESIGERYKPFVRYHNQFYIGYPISIKDGYDMQHCQAMISKNDISRVEEILKDTSLCTLLKEKNGIKLYSINKQSINELSNQFFNLNYQNLNDAQKKKSELAEFVINHCKYYVKKTSVINAPQFIDKDSMKPYPFYKDWQKFHEAYKKELDAEPKTKKDNGKLVYDISGIDDFWTEFCKKYFGIKTKDNRNKARKVFSIVALTSAPGTVFRIKRKTPKGHIYQATAIDNQQISGDYANVLLAGNSKTLALAGQKPSSDLKKELSVKESKDIRDIKLEPSRFFKEGFDCRGIEVIVNKTSATIKNFPLTKIDKKIKKLIFKTLFEKKDGKRQKQKTSISLKEKNTMQETLKKLLKDSIKVTIRDGSISGIEISKKTVNFTLPFKSENLAKLLDDKRPAATKKAGQAKKKKGSLEYPYDVPDYAYPYDVPDYAYPYDVPDYALE

SEQ ID NO: 34 - protein, 1372 aa, Legionella pneumophila
MESSQILSPIGIDLGGKFTGVCLSHLEAFAELPNHANTKYSVILIDHNNFQLSQAQRRATRHRVRNKKRNQFVKRVALQLFQHILSRDLNAKEETALCHYLNNRGYTYVDTDLDEYIKDETTINLLKELLPSESEHNFIDWFLQKMQSSEFRKILVSKVEEKKDDKELKNAVKNIKNFITGFEKNSVEGHRHRKVYFENIKSDITKDNQLDSIKKKIPSVCLSNLLGHLSNLQWKNLHRYLAKNPKQFDEQTFGNEFLRMLKNFRHLKGSQESLAVRNLIQQLEQSQDYISILEKTPPEITIPPYEARTNTGMEKDQSLLLNPEKLNNLYPNWRNLIPGIIDAHPFLEKDLEHTKLRDRKRIISPSKQDEKRDSYILQRYLDLNKKIDKFKIKKQLSFLGQGKQLPANLIETQKEMETHFNSSLVSVLIQIASAYNKEREDAAQGIWFDNAFSLCELSNINPPRKQKILPLLVGAILSEDFINNKDKWAKFKNFWNTHKIGRTSLKSKCKEIEEARKNSGNAFKIDYEEALNHPEHSNNKALIKIIQTIPDIIQAIQSHLGHNDSQALIYHNPFSLSQLYTILETKRDGFHKNCVAVTCENYWRSQKTEIDPEISYASRLPADSVRPFDGVLARMMQRLAYEIAMAKWEQIKHIPDNSSLLIPIYLEQNRFEFEESFKKIKGGSSDKTLEQAIEKQNIQWEEKFQRIINASMNICPYKGASIGGQGEIDHIYPRSLSKKHFGVIFNSEANLIYCSSQGNREKKEEHYLLEHLSPLYLKHQFGTDNVSDIKNFISQNVANIKKYISFHLLTPEQQKAARHALFLDYDDEAFKTITKFLMSQQKARVNGTQKFLGKQIMEFLSTLADSKQLQLEFSIKQITAEEVHDHRELLSKQEPKLVKSRQQSFPSHAIDATLTMSIGLKEFPQFSQELDNSWFINHLMPDEVHLNPVRSKEKYNKPNISSTPLFKDSLYAERFIPVWVKGETFAIGFSEKDLFEIKPSNKEKLFTLLKTYSTKNPGESLQELQAKSKAKWLYFPINKTLALEFLHHYFHKEIVTPDDTTVCHFINSLRYYTKKESITVKILKEPMPVLSVKFESSKKNVLGSFKHTIALPATKDWERLFNHPNFLALKANPAPNPKEFNEFIRKYFLSDNNPNSDIPNNGHNIKPQKHKAVRKVFSLPVIPGNAGTMMRIRRKDNKGQPLYQLQTIDDTPSMGIQINEDRLVKQEVLMDAYKTRNLSTIDGINNSEGQAYATFDNWLTLPVSTFKPEIIKLEMKPHSKTRRYIRITQSLADFIKTIDEALMIKPSDSIDDPLNMPNEIVCKNKLFGNELKPRDGKMKIVSTGKIVTYEFESDSTPQWIQTLYVTQLKKQP

SEQ ID NO: 35 - protein, 1125 aa, Francisella tularensis; identical to SEQ ID NO: 11

SEQ ID NO: 36 - protein, 1629 aa, Francisella tularensis; identical to SEQ ID NO: 24

SEQ ID NO: 37 - protein, 1372 aa, Legionella pneumophila
MESSQLLSPIGIDLGGKFTGVCLSHLESFAELPNHANTKYSVILMDHNNFQLSQAQRRITRHRVRNKKRNQFVKRVALQLFQHMLSRELNVKEEIALCHYLNNRGYTYVDTDLDEYLKDETTVNLLKELLPPESEHNFIDWLLQKMQSSKFREILGSRVEEKKDDKELKNAVKNIKNFITGFEKNSVEGHRHRKVYFENIKSDITNDNQLDGIKKKIPSVCLSNLLGHLSNLQWKNLHRYLAKNPKQFDEQTFGNEFLRMLKNFKHLKGSQESLAVRDLIQQLEQSKDYISILEKTPPEITIPPYEARTNTGMEKDQSLLLNPEKLNNLYPKWRNLIPGIIDAHPFLEKDLEHTKLRDRKRIISPSKQDEKRDSYILQRYLDLNKKIDKFKIKKQLSFLGQGKQLPANLIETHKEMETHFSSSLVSALIQIASAYNKEREDAAQGIWFDNAFSLCELSNINPPRKQKILPLLVGAILSEDFINNKDKWAKFKSFWNTHKIGRTLLKYKCKEIEEARKNSGNAFKIDYEEALNHPEHSNNKALTKIIQTIPDIIQAIQSHLGHNDSQALIYNNPFSLSQLYTILETKRDGFHKNCVAVTCENYWRSQKTEIDPEISYASRLPADSVRPFDGVLARMMQRLAYEIAMAKWEQIKHIPDNSSLLIPIYLEQNRFEFEESFKKIKGISRDKTLEQAIEKQNIRWEEKFQRIINASMNVCPYKGTLIGGQGEIDHIYPRSLSKKHFGTIFNSEANLIYCSSQGNREKKEEHYLLEHLSPIYLKHQFGTDNVSDIKNFISQNVANIKKYISFHLLTPEQQKAARHALFLDYDDEAFKTVTKFLMSQQKARVNGTQKFLGKQIMEFLSTLADSKQLQLEFSIKQINAEEVHNHRELLSKQEPKLAKSQQQSFPSHAIDATLTMGIGLKEFPQFSQELDNSWFINHLMPDEVHLNPVQSKEKYNKPNISSIPLFKDSLYAERFIPVWVKGETFAIGFSEKDLFEIKPSNKEKLFTLLKTYSTKNPGESLQELQAISKAKWLYFPINKTLALEFLHHYFHKETVTPDDTTVCHFINSLRYYTKKESITVKILKESMPVLSVRFESSKKNVLGTFKHTIALPATKDWERLFNHPNFLALKANPNPNPKEFNEFIKKYFLSENNPNSDIPNNDHTIKPQKHKTVRKVFSLPVIPGNAGTMMRIRRKDNKGQPLYQLQTIDDTPSMGIQINEGKLVKQEVLMDAYKTRNLSTIDGINNSERQAYAAFDNWLTLPVSTFKPEIIKLEMKPHSKTRRYIRITQSLADFIKTIDEALMIKPSDSIDDPLNMPNEIVCKNKLFGNELKPRDGKMKIVSTGKTVTYEFESDSTPQWIQKLYVTQLKKHP

SEQ ID NO: 38 - protein, 1125 aa, Francisella tularensis; identical to SEQ ID NO: 11

SEQ ID NO: 39 - protein, 1372 aa, Legionella pneumophila
MESSQLLSPIGIDLGGKFTGVCLSHLESFAELPNHANTKYSVILMDHNNFQLSQAQRRITRHRVRNKKRNQFVKRVALQLFQHMLSRELNVKEEIALCHYLNNRGYTYVDTDLDEYLKDETTVNLLKELLPPESEHNFIDWLLQKMQSSKFREILGSRVEEKKDDKELKNAVKNIKNFITGFEKNSVEGHRHRKVYFENIKSDITNDNQLDGIKKKIPSVCLSNLLGHLSNLQWKNLHRYLAKNPKQFDEQTFGNEFLRMLKNFKHLKGSQESLAVRDLIQQLEQSKDYISILEKTPPEITIPPYEARTNTGMEKDQSLLLNPEKLNNLYPKWRNLIPGIIDAHPFLEKDLEHTKLRDRKRLISPSKQDEKRDSYILQRYLDLNKKIDKFKIKKQLSFLGQGKQLPANLIETHKEMETHFSSSLVSALIQIASAYNKEREDAAQGIWFDNAFSLCELSNINPPRKQKILPLLVGAILSEDFINNKDKWAKFKSFWNTHKIGRTLLKYKCKEIEEARKNSGNAFKIDYEEALNHPEHSNNKALTKIIQTIPDIIQAIQSHLGHNDSQALIYNNPFSLSQLYTILETKRDGFHKNCVAVTCENYWRSQKTEIDPEISYASRLPADSVRPFDGVLARMMQRLAYEIAMAKWEQIKHIPDNSSLLIPIYLEQNRFEFEESFKKIKGISRDKTLEQAIEKQNIRWEEKFQRIINASMNVCPYKGTLIGGQGEIDHIYPRSLSKKHFGTIFNSEANLIYCSSQGNREKKEEHYLLEHLSPIYLKHQFGTDNVSDIKNFISQNVANIKKYISFHLLTPEQQKAARHALFLDYDDEAFKTVTKFLMSQQKARVNGTQKFLGKQIMEFLSTLADSKQLQLEFSIKQINAEEVHNHRELLSKQEPKLAKSQQQSFPSHAIDATLTMGIGLKEFPQFSQELDNSWFINHLMPDEVHLNPVQSKEKYNKPNISSIPLFKDSLYAERFIPVWVKGETFAIGFSEKDLFEIKPSNKEKLFTLLKTYSTKNPGESLQELQAISKAKWLYFPINKTLALEFLHHYFHKETVTPDDTTVCHFINSLRYYTKKESITVKILKESMPVLSVRFESSKKNVLGTFKHTIALPATKDWERLFNHPNFLALKANPNPNPKEFNEFIKKYFLSENNPNSDIPNNDHTIKPQKHKTVRKVFSLPVIPGNAGTMMRIRRKDNKGQPLYQLQTIDDTPSMGIQINEGKLVKQEVLMDAYKTRNLSTIDGINNSERQAYAAFDNWLTLPVSTFKPEIIKLEMKPHSKTRRYIRITQSLADFIKTIDEALMIKPSDSIDDPLNMPNEIVCKNKLFGNELKPRDGKMKIVSTGKTVTYEFESDSTPQWIQKLYVTQLKKHP

SEQ ID NO: 40 - protein, 1372 aa, Legionella pneumophila
MESSQILSPIGIDLGGKFTGVCLSHLEAFAELPNHANTKYSVILIDHNNFQLSQAQRRATRHRVRNKKRNQFVKRVALQLFQHILSRDLNAKEETALCHYLNNRGYTYVDTDLDEYIKDETTINLLKELLPSESEHNFIDWFLQKMQSSEFRKILVSKVEEKKDDKELKNAVKNIKNFITGFEKNSVEGHRHRKVYFENIKSDITKDNQLDSIKKKIPSVCLSNLLGHLSNLQWKNLHRYLAKKPKQFDEQTFGNEFLRMLKNFRHLKGSQEFLAVRNLIQQLEQSQDYISILEKTPPEITIPPYEARTNTGMEKDQSLLLNPEKLNNLYPNWRNLMPGIIDAHPFLEKDLEHTKLRDRKRIISPSKQDEKRDSYILQRYLDLNKKIDKFKIKKQLSFLGQGKQLPANLIETQKEMETHFNSSLVSVLIQIASAYNKEREDAAQGIWFDNAFSLCELSNINPPRKQKILPLLVGAILSEDFINNKDKWAKFKDFWNTHKIGRTSLKSKCKEIEEARKNSGNAFKIDYEEALNHPEHSNNKTLIKIIQTIPDIIQAIQSHLGHNDSQALIYHNPFSLSQLYTILETKRDGFHKNCVAVTCENYWRSQKTEIDPEISYASRLPADSVRPFDGVLARMMQRLAYEIAMAKWEQIKHIPDNSSLLIPIYLEQNRFEFEESFKKIKGSSSDKTLEQAIEKQNIQWEEKFQRIINASMNICPYKGASIGGQGEIDHIYPRSLSKKHFGVIFNSEANLIYCSSQGNREKKEEHYLLEHLSPLYLKHQFGTDNVSDIKNFISQNVANIKKYISFHLLTPEQQKASRHALFLDYDDEAFKTITKFLMSQQKARVNGTQKFLGKQIMEFLSTLADSKQLQLEFSIKQITAEEVHDHRELLSKQEPKLVKSRQQSFPSHAIDATLTMSIGLKEFPQFSQELDNSWFINHLMPDEVHLNPVRSKEKYNKPNISSTPLFKDSLYAERFIPVWVKGETFAIGFSEKDLFEIKPSNKEKLFTLLKTYSTKNPGESLQELQAKSKAKWLYFPINKTLALEFLHHYFHKEIVTPDDTTVCHFINSLRYYTKKESITVKILKEPMPVLSVKFESSKKNVLGSFKHTIALPATKDWERLFNHPNFLALKANPAPNPKEFNEFIRKYFLSDNNPNSDIPNNGHNIKPQKHKAVRKVFSLPVIPGNAGTMMRIRRKDNKGQPLYQLQTIDDTPSMGIQINEDRLVKQEVLMDAYKTRNLSTIDGINNSEGQAYATFDNWLTLPVSTFKPEIIKLEMKPHSKTRRYIRITQSLADFIKTIDEALMIKPSDSIDDPLNMPNEIVCKNKLFGNELKPRDGKMKIVSTGKIVTYEFESDSTPQWIQTLYVTQLKKQP

SEQ ID NO: 41 - protein, 1372 aa, Legionella pneumophila; identical to SEQ ID NO: 39

SEQ ID NO: 42 - protein, 1629 aa, Francisella novicida
MNFKILPIAIDLGVKNTGVFSAFYQKGTSLERLDNKNGKVYELSKDSYTLLMNNRTARRHQRRGIDRKQLVKRLFKLIWTEQLNLEWDKDTQQAISFLFNRRGFSFITDGYSPEYLNIVPEQVKAILMDIFDDYNGEDDLDSYLKLATEQESKISEIYNKLMQKILEFKLMKLCTDIKDDKVSTKTLKEITSYEFELLADYLANYSESLKTQKFSYTDKQGNLKELSYYHHDKYNIQEFLKRHATINDRILDTLLTDDLDIWNFNFEKFDFDKNEEKLQNQEDKDHIQAHLHHFVFAVNKIKSEMASGGRHRSQYFQEITNVLDENNHQEGYLKNFCENLHNKKYSNLSVKNLVNLIGNLSNLELKPLRKYFNDKIHAKADHWDEQKFTETYCHWILGEWRVGVKDQDKKDGAKYSYKDLCNELKQKVTKAGLVDFLLELDPCRTIPPYLDNNNRKPPKCQSLILNPKFLDNQYPNWQQYLQELKKLQSIQNYLDSFETDLKVLKSSKDQPYFVEYKSSNQQIASGQRDYKDLDARILQFIFDRVKASDELLLNEIYFQAKKLKQKASSELEKLESSKKLDEVIANSQLSQILKSQHTNGIFEQGTFLHLVCKYYKQRQRARDSRLYIMPEYRYDKKLHKYNNTGRFDDDNQLLTYCNHKPRQKRYQLLNDLAGVLQVSPNFLKDKIGSDDDLFISKWLVEHIRGFKKACEDSLKIQKDNRGLLNHKINIARNTKGKCEKEIFNLICKIEGSEDKKGNYKHGLAYELGVLLFGEPNEASKPEFDRKIKKFNSIYSFAQIQQIAFAERKGNANTCAVCSADNAHRMQQIKITEPVEDNKDKIILSAKAQRLPAIPTRIVDGAVKKMATILAKNIVDDNWQNIKQVLSAKHQLHIPIITESNAFEFEPALADVKGKSLKDRRKKALERISPENIFKDKNNRIKEFAKGISAYSGANLTDGDFDGAKEELDHIIPRSHKKYGTLNDEANLICVTRGDNKNKGNRIFCLRDLADNYKLKQFETTDDLEIEKKIADTIWDANKKDFKFGNYRSFINLTPQEQKAFRHALFLADENPIKQAVIRAINNRNRTFVNGTQRYFAEVLANNIYLRAKKENLNTDKISFDYFGIPTIGNGRGIAEIRQLYEKVDSDIQAYAKGDKPQASYSHLIDAMLAFCIAADEHRNDGSIGLEIDKNYSLYPLDKNTGEVFTKDIFSQIKITDNEFSDKKLVRKKAIEGFNTHRQMTRDGIYAENYLPILIHKELNEVRKGYTWKNSEEIKIFKGKKYDIQQLNNLVYCLKFVDKPISIDIQISTLEELRNILTTNNIAATAEYYYINLKTQKLHEYYIENYNTALGYKKYSKEMEFLRSLAYRSERVKIKSIDDVKQVLDKDSNFIIGKITLPFKKEWQRLYREWQNTTIKDDYEFLKSFFNVKSITKLHKKVRKDFSLPISTNEGKFLVKRKTWDNNFIYQILNDSDSRVDGTKPFIPAFDISKNEIVEAIIDSFTSKNIFWLPKNIELQKVDNKNIFAIDTSKWFEVETPSDLRDIGVATIQYKIDNNSRPKVRVKLDYVIDDDSKINYFTNHSLLKSRYPDKVLEILKQSTTIEFESSGFNKTIKEMLGMTLAGIYNETSNN

SEQ ID NO: 43 - protein, 1428 aa, Parasutterella excrementihominis
MGKTHIIGVGLDLGGTYTGTFITSHPSDEAEHRDHSSAFTVVNSEKLSFSSKSRTAVRHRVRSYKGFDLRRRLLLLVAEYQLLQKKQTLAPEERENLRIALSGYLKRRGYARTEAETDTSVLESLDPSVFSSAPSFTNFFNDSEPLNIQWEAIANSPETTKALNKELSGQKEADFKKYIKTSFPEYSAKEILANYVEGRRAILDASKYIANLQSLGHKHRSKYLSDILQDMKRDSRITRLSEAFGSTDNLWRIIGNISNLQERAVRWYFNDAKFEQGQEQLDAVKLKNVLVRALKYLRSDDKEWSASQKQIIQSLEQSGDVLDVLAGLDPDRTIPPYEDQNNRRPPEDQTLYLNPKALSSEYGEKWKSWANKFAGAYPLLTEDLTEILKNTDRKSRIKIRSDVLPDSDYRLAYILQRAFDRSIALDECSIRRTAEDFENGVVIKNEKLEDVLSGHQLEEFLEFANRYYQETAKAKNGLWFPENALLERADLHPPMKNKILNVIVGQALGVSPAEGTDFIEEIWNSKVKGRSTVRSICNAIENERKTYGPYFSEDYKFVKTALKEGKTEKELSKKFAAVIKVLKMVSEVVPFIGKELRLSDEAQSKFDNLYSLAQLYNLIETERNGFSKVSLAAHLENAWRMTMTDGSAQCCRLPADCVRPFDGFIRKAIDRNSWEVAKRIAEEVKKSVDFTNGTVKIPVAIEANSFNFTASLTDLKYIQLKEQKLKKKLEDIQRNEENQEKRWLSKEERIRADSHGICAYTGRPLDDVGEIDHIIPRSLTLKKSESIYNSEVNLIFVSAQGNQEKKNNIYLLSNLAKNYLAAVFGTSDLSQITNEIESTVLQLKAAGRLGYFDLLSEKERACARHALFLNSDSEARRAVIDVLGSRRKASVNGTQAWFVRSIFSKVRQALAAWTQETGNELIFDAISVPAADSSEMRKRFAEYRPEFRKPKVQPVASHSIDAMCIYLAACSDPFKTKRMGSQLAIYEPINFDNLFTGSCQVIQNTPRNFSDKTNIANSPIFKETIYAERFLDIIVSRGEIFIGYPSNMPFEEKPNRISIGGKDPFSILSVLGAYLDKAPSSEKEKLTIYRVVKNKAFELFSKVAGSKFTAEEDKAAKILEALHFVTVKQDVAATVSDLIKSKKELSKDSIENLAKQKGCLKKVEYSSKEFKFKGSLIIPAAVEWGKVLWNVFKENTAEELKDENALRKALEAAWPSSFGTRNLHSKAKRVFSLPVVATQSGAVRIRRKTAFGDFVYQSQDTNNLYSSFPVKNGKLDWSSPIIHPALQNRNLTAYGYRFVDHDRSISMSEFREVYNKDDLMRIELAQGTSSRRYLRVEMPGEKFLAWFGENSISLGSSFKFSVSEVFDNKIYTENAEFTKFLPKPREDNKHNGTIFFELVGPRVIFNYIVGGAASSLKEIFSEAGKERS

SEQ ID NO: 44 - protein, 1418 aa, Ruminobacter sp.
MGGKYTGFISYTSNDLPDSENVKAAIIEMPDDGSVINYTVKNRTAVRHHLRANNRYKKARKLIFTILADTIKRNLTQSEQEAISSLMLRRGYTRLETEIDLEQLKECPVDLFFQCCPGLFTGDVPLYDQFINNCNDDTVYVYRESLSSIKETVSNLSDKTEKSMYGSALKTMVDFVDKFIDQKEFGHKHRTEYLANIRKDIQKDSRLNDLIKLISGEERLYNCIGNISNLQLRALRWYFNDRGMSGKAVFDKKRFKDVWYRAYKYFHYTAGSNQKDNAEKVDIIKKKNEFLKRIEQTENITGLLLAQDPVFTIPPYEDQNNRRPPVDQTLLLSPQSLDAHYPGKWELWVQKFMDYGSGSYSSLSDELEQIVKLTDRSSRLQSAGGKQSDHIASYTEQKLIHSYYLQRLLDITYNRGNPESQIRKWAQNPNSCSATNAVIKNILGESDIDSFFELANNYYMEVSLSKKGLWSIVEHPLLEISGIHPPMKSKMLEELVAGVLNIRKGFNLERFKEVWNSTVKGKSTVRSLCSYIEKTRKKYGNCFKQEYKNVCRYEELKNKASEVHFSSDIKIDKEVVKVYEYTKNLSKFIGEKLELSTDQQSKFANPFSLAQLYTILENDVHGFSGNCKAVCLENTCRMQMSDKGNALCCRLPAESTRPFDGSLGNILDRQAYEIAKIKIAEIKELSALKNTKVKLSVLVEENSFEFSSSLSTIKKSLKAKQLREFALKAEKTEREKWKSKDERLKNDSHNICAYTGMALSDDLSENDHIVSRSETKESYGTIYNSEFNLIRVSRRGNQLKGNNIYTLDNLNPKYLEAVFGTSDTAIITTRIRETLNRLLISNPNLNIDIMTEEERQCCRHALFTSRTGVPFNQIIQAISKQYRARVNGTQAWFVKNLIAKIDEGLREWKSINNITVEYNAYKIDAGSTSEIRHDIGKLDARYEKKDIQPITSHAIDAVCLLGNASTQQEISEEISGNNEISVLSDVKELIKLIPDRFDIIRISSLNFAEKNNPESKQLFKDTIYAEHFLCIMEKDDTVKVGFDFGSNSIQIVKGGKQLLSCLANYLESPKQNETTGFRTYKVCKTAAFKLFERFYRGLVAEGSDEELAYLALMSLRYTTLHQDVFSLLYDVKSKKFAAKKDILKNLDIKISFPSVLKLKTDKASLVLPSFNEWAHIASIFEDYLGKKDEQESGYDKLKQYLGTILNKTINKNHAKSKRVYSLPVVASPSGGVRIKRLTHTHGDIYQLVAANTPVTSISKGFASADNGDVLWDEAVMVDSYTTKNLTVINKKISGDKNFVSMDEQRLVYESPDERVYMTPATDIRRGITIEQKFEKFVYCIDQQNIYKSFHDLPTEIKTDPKIFMERLNIDICGKPRGNLKILSIGNIIKYSYMVESSNRVMNQVYNNPIDKGTIFKSN

SEQ ID NO: 45 - protein, 1629 aa, Francisella tularensis
MNFKILPIAIDLGVKNTGVFSAFYQKGTSLERLDNKNGKVYELSKDSYTLLMNNRTARRHQRRGIDRKQLVKRLFKLIWTEQLNLEWDKDTQQAISFLFNRRGFSFITDGYSPEYLNIVPEQVKAILMDIFDDYNGEDDLDSYLKLATEQESKISEIYNKLMQKILEFKLRKLCTDIKDDKVSTKTLKEITSYEFELLADYLANYSEILKTQKFSYTDKQGNLKELSYYHHDKYNIQEFLKRHATINIQILDTLLTDDLDIWNFNFEKFDFDKNEEKLQNQEDKDHIQAHLHHFVFAVNKIKSEMASGGRHRSQYFQEITNVLDENNHQEGYLKNFCENLHNKKYSNLSVKNLVNLIGNLSNLELKPLRKYFNDKIHAKADHWDEQKFTETYCHWILGEWRVGVKDQDKKDGAKYSYKDLCNELKQKVTKAGLVDFLLELDPCRTIPPYLDNNNRKPPKCQSLILNPKFLDNQYPNWQQYLQELKKLQSIQNYLESFETDLKVLKSSKDQPYFVEYRSSNQQIASGQRDYKDLDARILQFIFDRVKASDELLLNEIYFQAKKLKQKASSELEKLESSKKLDEVIANSQLSQILKSQHTNGIFEQGTFLHLVCKYYKQRQRARDSRLYIMPEYRYDKKLHKYNNTGRFDDDNQLLTYCNHKPRQKRYQLLNDLAGVLQVSPNFLKDKIGSDDDLFISKWLVEHIRGFKKACEDSLKIQKDNRGLLNHKINIARNTKGKCEKEIFNLICKIEGSEDKKGNYKHGLAYELGVLLFGEPNEASKPEFDRKIKKFNSIYSFAQIQQIAFAERKGNANTCAVCSADNAHRMQQIKITEPVEDNKDKIILSAKAQRLPAITTRIVDGAVKKMATILAKNIVDDNWQNIKQVLSAKHQLHIPIITESNAFEFEPALADVKGKSLKDRRKKALERISPENIFKDKNNRIKEFAKGISAYSGANLTDGDFDGAKEELDHIIPRSHKKYGTLNDEANLICVTRGDNKNKGNRIFCLRDLANNYKLKQFETTDDLEIEKKIADTIWDANKKDFKFGNYRSFINLTPQEQKAFRHALFLADENPIKQAVIRAINNRNRTFVNGTQRYFAEVLANNIYLRAKKENLNTDKISFDYFGIPTIGNGRGIAEIRQLYEKVDSDIQAYAKGDKPQASYSHLIDAMLAFCIAADEHRNDGSIGLEIDKNYSLYPLDKNTGEVFTKDIFSQIKITDNEFSDKKLVRKKATEGFNTHRQMTRDGIYAENYLPILIHKELDEVRKGYTWKNSEEIKIFKGKKYDIQQLNNLLYCLKFVDKPISIDIQISTLEELRNILTTNNIAATAEYYYINLKTQKLHEYYIENYNTALGYKKYTKEMEFLRSLAYRSERVKIKSIDDVKQVLDKDSNFIIGKITLPFKKEWQRLYREWQNITIKDDYEFLKSFFNVKSITKLHKKVRKDFSLPISTNEGKFLVKRKTWDNNFIYQILNDSDSRVDGTKPFIPAFDISKNEIVEAIIDSFTSKNIFWLPKNIELQKVDNKNIFAIDTSKWFEVETPSDLRDIGVATIQYKIDNNSRPKVRVKLDYVIDDDSKINYFTNHSLLKSRYPDKVLEILKQSTIIEFESSGFNKTIKEMLGMTLAGIYNETSNN

SEQ ID NO: 46 - protein, 1123 aa, Francisella tularensis; identical to SEQ ID NO: 12

SEQ ID NO: 47 - protein, 1629 aa, Francisella tularensis
MNVKILPIAIDLGVKNTGVFSAFYQKGTSLERLDNKNGKVYELSKDSYTLLMNNRTARRHQRRGIDRKQLVKRLFKLIWTEQLNLEWDKDTQQAISFLFNRRGFSFITDGYSPEYLNIVPEQVKAILMDIFDDYNGEDDLDSYLKLATEQESKISEIYNKLMQKILEFKLRKLCTDIKDDKVSTKTLKEITSYEFELLADYLANYSEILKTQKFSYTDKQGNLKELSYYHHDKYNIQEFLKRHATINDEILDTLLTDDLDIWNFNFEKFDFDKNEEKLQNQEDKDHTQAHLHHFVFAVNKIKSEMASGGRHRGQYFQEITNVLDENNHQEGYLKNFCENLHNKKYSNLSVKNLVNLIGNLSNLELKPLRKYFNDKIHAKADHWDEQKFTETYCHWILGEWRVGVKDQDKKDGAKYSYKDLCNELKQKVTKAGLVDFLLELDPCRTIPPYLDNNNRKPPKCQSLILNPKFLDNQYPNWQQYLQELKKLQSIQNYLESFETDLKVLKSSKDQPYFVEYKSSNQQIASGQRDYKDLDARILQFIFDRVKASDELLLNEIYFQAKKLKQKASSELEKLESSKKLDEVIANSQLSQILKSQHTNGIFEQGTFLHLVCKYYKQRQRARDSRLYIMPEYRYDKKLDKYNNTGRFDDDNQLLTYCNHKPRQKRYQLLNDLAGVLQVSPNFLKDKIGSDDDLFISKWLVEHIRGFKKACEDSLKIQKDNRGLLNHKINIARNTKGKCEKEIFNLICKIEGSEDKKGNYKHGLAYELGVLLFGEPNEASKPEFDRKIKKFNSIYSFAQIQQIAFAERKGNANTCAVCSADNAHRMQQIKITEPVEDNKDKIILSAKAQRLPAIPTRIVDGAVKKMATILAKNIVDDNWQNIKQVLSAKHQLHIPIITESNAFEFEPALADVKGKSIKDRRKKALERISPENIFKDKNNRIKEFAKGISAYSGDNLASGDFDGAKEELDHIIPRSHKKYGTLNDEANLICVTRDDNKNKGNRIFCLHDLANNYKLKQFETTDDLEIEKKIADTIWDASKKDFKFGNYRSFINLTPQEQKAFRHALFLADENPIKQAVIRAINNRNRTFVNGTQRYFAEVLANNIYLRAKKENLNTDKISFDYFGIPTIGNGRGIVEIRQLYEKVDSDIQAYAKGDKPQASYSHLIDAMLAFCIAADEHRNDGSIGLEIDKNYSLYPLDKNTGEVFTKDIFSQIKITNNEFSDKKLVRKKATEGFNTHRQMTRDGIYAENYLPILIHKELDEVRKGYTWGNSEELKIHKGKKYDIQQLNNLVYCLKFIDKSISIDIQISTLEELRNILTTNNIATTAEYYYINLKTQKLHEYYIENYNTALGYKKYTKEMEFLRSLAYRSERVKIKSIDDVKQVLDKDSNFIIGKITLPFKKEWQRLYREWQNTTIKDDYEFLKSFFNVKSITKLHKKVRKDFSLPISTNEGKFLVKRKTWDNNFIYQILNDSDSRVDGTKPFIPAFDISKNEIVEAIIDSFTSKNIFWLPKNIELQKVDNKNIFAIDTSKWFEVETPSDLRDIGVATIQYKIDNNSRPKVRVKLDYVIDDDSKINYFTNHSLLKSRYPDKVLEILKQSTIIEFESSGFNKTIKEMLGMTLAGIYNETSNN

SEQ ID NO: 48 - protein, 878 aa, Francisella tularensis
LLNDLAGVLQVSRNQLLSSVEEWFQQAQRVGEISKSQDEQIFEWLKSFKIASYCKAAVEMQKQYRGTLKNAIQTAIFRQSENINKNKNKNKNTGNQQQALSENSKDVKSLTADEKKLLKLIENIAKASQKIGESLGLNDKQIKKFNSIYNFAQIQQIAFAERKGNANTCAVYSADNAHRMQQIKITELVEDNKDNIILSAKAQRLPAIPTRIVDGAVKKMATILAKNIVDDNWQNIKQVLSAKHQLHIPIITESNAFEFEPALADVKGKSLKDRRKKALERISPENIFKDKNNRIKEFAKGISAYSGANLTDGDFDGAKEELDHIIPRSYKKYGTLNDEVNLICVTRDDNKNKGKRIFCLNDLANNYKLKQFETTDDLEIEKKIADTIWDASKQDFKFGNYRSFINLIPQEQKAFRYALFLADENSIKQAVIRAINNRNRTFVNGTQRYFAEVLANNIYLRAKKENLNTDKISFDYFGIPTIGNGRGIADIRQLYEKVDSDIQAYAKGDKPQASYSHLIDAMIAFCVAADEHRNDGSIGLEIDKNYSLYPLDKNTGEVFTKDIFSQIKITDNEFSDKKLVRKKATEGFNTHRQMTRDGIYAENYLPILIHKELDEVRKGYTWGNSEELKIHKGKKYNIQQLNNIVYCLKFIDKSISIDIQISTLEELRNILTTNNIAATAEYYYINLKNQKLHEYYIENYNTALDYKKYSKEMEFLRSLAYRSERVKIKSIDDVKQVLDKDSNFIIGKITLPFKKEWQRLYLEWQNTTIKDDYEFLKSFFNVKSINKLHKKVRKDFSLPISTNEGKFLVKRKTWDNNFIYQILNDSDSRVDGTKPFIPAFDISKNEIVEAIIDSFTSKNIFWLPKNIELQKVDKIFLL

SEQ ID NO: 49 - protein, 1372 aa, Legionella londiniensis
MESSQILSPIGIDLGGKFTGVCLSHLEAFAELPNHANTKYSVILIDHNNFQLSQAQRRATRHRVRNKKRNQFVKRVALQLFQHILSRDLNAKEETALCHYLNNRGYTYVATDLDEYIKDETTINLLKELLPSESEHNFIDWFLQKMQSSEFRKILVSKVEEKKDDKELKNAVKNIKNFITGFEKNSVEGHRHRKVYFENIKSDITKDNQLDSIKKKIPSVCLSNLLGHLSNLQWKNLHRYLAKNPKQFDEQTFGNEFLRMLKNFRHLKGSQESLAIRNLIQQLEQSQDYISILEKTPPEITIPPYEARTNTGMEKDQSLLLNPEKLNNLYPNWRNLIPGIIDAHPFLEKDLEHTKLRDRKRIISPSKQDEKRDSYILQRYLDLNKKIDKFKIKKQLSFLGQGKKLPANLIETQKEMETHFNSSLVSVLIQIASAYNKEREDAAQGIWFDNAFRLCELSNINPPRKQKILPLLVGAILSEDFINNKDKWAKFKNFWNTHKIGRTSLKSKCKEIEEARKNSGNAFKIDYEEALNHPEHSNNKALIKIIQTIPDIIQAIQSHLGHNDSQALIYHNPFSLSQLYTILETKRDGFHKNCVAVTCENYWRSQKTEIDPEISYASRLPADSVRPFDGVLARMMQRLAYEIAMAKWEQIKHIPDNSSLLIPIYLEQNRFEFEESFKKIKGGSSDKTLEQAIEKQNIQWEEKFQRIINASMNICPYKGTSIGGQGEIDHIYPRSLSKKHFGVIFNSEANLIYCSSQGNREKKEEHYLLEHLSPLYLKHQFGTDNVSDIKNFISQNVANIKKYISFHLLTPEQQKAARHALFLDYDDEAFKTITKFLMSQQKARVNGTQKFLGKQIIEFLSTLADSKQLQLEFSIKQITAEEVHDHRELLSKQEPKLVKNRQQSFPSHAIDATLTMSIGLKEFPQFSQELDNSWFINHLMPDEVHLNPVRSKEKYNKPNISSTPLFKDSLYAERFIPVWVKGETFAIGFSEKDLFEIKPSNKEKLFTLLKTYSTKNPGESLQELQAKSKAKWLYFPINKTLALEFLHHYFHKEIVTPDDTIVCHFINSLRYYTKKESITVKILKEPMPVLSVKFESSKKNVLGSFKHTIALPATKDWERLFNHPNFLALKANPAPNPKEFNEFIRKYFLSGNNPNSDISNNGNNIKPQKHKAVRKVFSLPVIPGNAGTMMRIRRKDNKGQPLYQLQTIDDTPSMGIQINEDRLVKQEVLMDAYKTRNLSTIDGINNSEGQAYATFDNWLTLPVTTFKPEIIKLEMKPHSKTRRYIRITQSLADFIKTIDEALMIKPSDSIDDPLNMPNEIVCKNKLFGNELKPRDGKMKIVSTGKIVTYEFESDSTPQWIQTLYVTQLKKQP

SEQ ID NO: 50 - protein, 1123 aa, Francisella tularensis; identical to SEQ ID NO: 12

SEQ ID NO: 51 - protein, 1372 aa, Legionella pneumophila; identical to SEQ ID NO: 39

SEQ ID NO: 52 - protein, 1123 aa, Francisella tularensis; identical to SEQ ID NO: 12

SEQ ID NO: 53 - protein, 388 aa, Legionella pneumophila
MESSQILSPIGIDLGGKFTGVCLSHLEAFAELPNHANTKYSVILIDHNNFQLSQAQRRATRHRVRNKKRNQFVKRVALQLFQHILSRDLNAKEETALCHYLNNRGYTYVDTDLDEYIKDETTINLLKELLPSESEHNFIDWFLQKMQSSEFRKILVSKVEEKKDDKELKNAVKNIKNFITGFEKNSVEGHRHRKVYFENIKSDITKDNQLDSIKKKIPSVCLSNLLGHLSNLQWKNLHRYLAKNPKQFDEQTFGNEFLRMLKNFRHLKGSQESLAVRNLIQQLEQSQDYISILEKTPPEITIPPYEARTNTGMEKDQSLLLNPEKLNNLYPNWRNLIPGIIDAHPFLEKDLEHTKLRDRKRIISPSKQDEKRDSYILQRYLDLNKKNR

SEQ ID NO: 54 - protein, 1428 aa, Burkholderiales bacterium
MGKTHIIGVGLDLGGTYTGTFITSHPSDEAEHRDHSSAFTVVNSEKLSFSSKSRTAVRHRVRSYKGFDLRRRLLLLVAEYQLLQKKQTLAPEERENLRIALSGYLKRKGYARTEAETDTSVLESLDPSVFSSAPSFTNFFNDSEPLNIQWEAIANSPETTKALNKELSGQKEADFKKYIKTSFPEYSAKEILANYVEGRRAILDASKYIANLQSLGHKHRSKYLSDILQDMKRDSRITRLSEAFGSTDNLWRIIGNISNLQERAVRWYFNDAKFEQGQEQLDAVKLKNVLVRALKYLRSDDKEWSASQKQIIQSLEQSGDVLDVLAGLDPDRTIPPYEDQNNRRPPEDQTLYLNPKALSSEYGEKWKSWANKFAGAYPLLTEDLTEILKNTDRKSRIKIRSDVLPDSDYRLAYILQRAFDRSIALDECSIRRTAEDFENGVVIKNEKLEDVLSGHQLEEFLEFANRYYQETAKAKNGLWFPENALLERADLHPPMKNKILNVIVGQALGVSPAEGTDFIEEIWNSKVKGRSTVHSICNAIENERKTYGPYFSEDYKFVKTALKEGKTEKELSKKFAAVIKVLKMVSEVVPFIGKELRLSDEAQSKFDNPYSLAQLYNLIETERNGFSKVSLAAHLENAWRMTMTDGSAQCCRLPADCVRPFDGFIRKAIDRNSWEVAKRIAEEVKKSVDFTNGTVKIPVAIEANSFNFTASLTDLKYIQLKEQKLKKKLEDIQRNEENQEKRWLSKEERIRADSHGICAYTGRPLDDVGEIDHIIPRSLTLKKSESIYNSEVNLIFVSAQGNQEKKNNIYLLSNLAKNYLAAVFGASDLSQITNEIESTVLQLKAAGRLGYFDLLSEKERACARHALFLNSDSEARRAVIDVLGSRRKASVNGTQAWFVRSIFSKVRQALAAWTQETGNELIFDAISVPAADSSEMRKRFAEYRPEFRKPKVQPVASHSIDAMCIYLAACSDPFKTKRMGSQLAIYEPINFDNLFTGSCQVIQNTPRNFSDKTNIANSPIFKETIYAERFLDIIVSRGEIFIGYPSNMPFEEKPNRISIGGKDPFSILSVLGAYLDKAPSSEKEKLTIYRVVKNKAFELFSKVAGSKFTAEEDKAAKILEALHFVTVKQDVAATVSDLIKSKKELSKDSIENLAKQKGCLKKVEYSSKEFKFKGSLIIPAAVEWGKVLWNVFKENTAEELKDENALRKALEAAWPSSFGTRNLHSKAKRVFSLPVVATQSGAVRIRRKTAFGDFVYQSQDTNNLYSSFPVKNGKLDWSSPIIHPALQNRNLTAYGYRFVDHDRSISMSEFREVYNKDDLMRIELAQGTSSRRYLRVEMPGEKFLAWFGENSISLGSSFKFSVSEVFDNKIYTENAEFTKFLPKPREDNKHNGTIFFELVGPRVIFNYIVGGAASSLKEIFSEAGKERS

SEQ ID NO: 55 - protein, 1123 aa, Francisella tularensis; identical to SEQ ID NO: 12

SEQ ID NO: 56 - protein, 1629 aa, Francisella tularensis; identical to SEQ ID NO: 24

SEQ ID NO: 57 - protein, 1123 aa, Francisella tularensis; identical to SEQ ID NO: 12

SEQ ID NO: 58 - protein, 1125 aa, Francisella tularensis; identical to SEQ ID NO: 11

SEQ ID NO: 59 - protein, 1397 aa, Gammaproteobacteria bacterium
MTKNYISPIAIDLGAKFTGVALYQYLEGADCTQEVAKGLLVDDRGNVTWSQEGRRGKRHQVRGYKRRKMAKRLLWLILDSEYGIKREEVTEPLLKFINGLLNRRGYTYISEEVDEESMNVSPLPFSEMMPDYFNSSAPLLEQLAKLLSDKNKLVRFRAEGKIPSNKNEFKKLLDTALDGKYKDEKKELSEAWGNILIASENVLKSTVDGHKSRSEYLANIKEDIKSNEELEKQISSKEIDGFYNLVGHLSNFQLRLLRKYFNDPNMSGVSYWDEKRLEKYFYQWVQGWHTKGGTDEAEKKNIILKTKGAPLLKTLKSLSADLTIPPYEDQNNRRPPKCQSVLLSDEKLTMHYPKWKEWVGQLVKQNDNAYLNENVTLANALHRIVERSRSIDPYQLRLLISITDAEKRNDLAGYKRLKLSLGSEVDEFLLLVKNIVDETKEAREGLWFETENKLFFKCGKTPPRKEKLKSTLLSAVLGKNLSDDEQSSFIEEFWKSGTPKIERRNVRGWCRLASQVQKTYGVYLKEYGLQQLHKLEAGKKLDDKPLALLYKNSGLIASKIGEALNIEPDEVSRFASPHSLAQIFNIIEGDVAGFNKTCRACTYENIWRMQEEKVESLLTNQLLSEIHGERKVPLKSAMCTRLSADSTRPFDGQMASIIEHIARKIAQHKIAQINDVPKEFSIDIPIIIESNQFSFTAELEEIKRGRGSAKAKKAKELGEKSKAGWVSKTERIKTSSEGICPYTGAPLGGSGEIDHIIPRSLTGRTKKTVFNSEANLIYCSSKGNHDKGNRVYVIEQLNDKYLKKQFSTSDVNLIKKKIKTTIQRFTEGGEKLRSFSELSREDQKAFRHALFVPELKSEVTSLLAVKNITRVNGTQAWLAKKIASLLAEHLDKQGRDYTLSAHQIDPWSVSKQRKMLASAEPIWAKKDPQPAASHVVDAVCTFLEALEQPHTASRLKTISSTSFEKTGWRSALIPDLIKVDALDRRPKYRRYNIGSTSLFKDGIYAERFLPILIDENGLMAGYDIDNSLKAKGADVVFESLSPFLLFKGEEVGAQSLSDWQERIDGRYLYMSIDKVKAFDYLQEKVGEKDIAAELLNSIHFTQRKTELRAKFSDDSGKKMKTLDAIRKSLKLTVTVNEIGKRKEKCGFSGTIGIPAKSAWENLLDEPLLETYWGTKMPPQEIWEKVYRKHFPRNIPNQAHRKVRKDFSLPVVDSVSGGFRVKRKTPNGYNYQLLAIDGYSAVGFKKEGDNVDFKSPALVPQIAESKSVTPISSELVHLDKNEIVYFDEWRKIDISDSDLKQFVSSLELAPGSQNRFYIRFTVDEDQFERHFKSALRVNGIQDLDTVNKTFDWNREIPSLLIPPRSNLFLLETGQKITFEYIANGANAEVKKAYSLRRA

SEQ ID NO: 60 - protein, 1125 aa, Francisella tularensis; identical to SEQ ID NO: 11

SEQ ID NO: 61 - protein, 1123 aa, Francisella tularensis; identical to SEQ ID NO: 12

SEQ ID NO: 62 - protein, 1629 aa, Francisella tularensis; identical to SEQ ID NO: 25

SEQ ID NO: 63 - protein, 1413 aa, Succinatimonas sp.
MSKKTVYSNIAIDLGGKYTGCVSYTSSILPSADDINAFIIEMPDDGNGIKYTVKDRTQKRHMIRALDRFKKARKLIYLVISSVIHRELTADEKESISSLMKRRGYTRLEAEIDLDILKECPVDLFASYIKDLFDESQSLYDQFNQKCCDLDSAKAMKKALSSEELKQAMDSSELDKIEKKIYKSAFDVMVKAAENIINTCEFGNKHRKQYLSDIKADINKDSRLADIVKSFDGNEKLFKCVGNISNLQLRALRWYFNDINMKGNPKWIPERFKKVWARAYKYFHYPKEDQQKARELIKNLEISNDVTSLLCSIDPLDTIPPYEDQNNRNPPTDLTLLLSPKALDKKYTNLWEKWAEKFAKLYPNLKYQLEDIVKISDRKSRIDVKSSSSYTQSKVFNSYVMQRLFDLAADKNEPITLLRSWVRDPSNSKLADTVKIIQSVVEDREDDFYKLAQSYYNEVEMAKSGLWSVIDDPLLEISGIHPPMKNKVISTLVGNVLGINNDFDYEKFLEVWRAPIKGRKTLKSVCKDIEGLRKEYGNTFKIEYDYANYSAKEKKERLTADQKKLVEINKIIEEISPLVRNSISQDPLSEIKFNNPFSFSQLYTLIETDTLGFSSNCVAVNMENNARMQFLLGNHALCSRLPTESVRPFDGALGKILERQAYEIAKVKSAEIKELDSLNETVINVGILIEQNKFEFTESIAKIKKSKLLEKIKKRSQSGVSRQLKKWENKEKRIKSASRGVCPYTGERISETNGEIDHIIPRSFTKSSMGTIFNSEANLIFCRLTGNRNKDENMYTLRELSPKYLNAVFGTANIVQIQQNIEGTVAKISSKNPRFLFDMMDQKEQDCCRHALFMPHSKAYQIVVSAMARSYSTRVNGTQSYFVNAIISKLKNELSSWLKSNRNTLNFFAYKVDPSDVHSTRDDLSKLNTLLKKQENQPITSHAIDALCVLASASTNERISENISKESCLAKISNTGNLLKLEPHEFKILRIEKKDFSDKNDDFSRKLFNDTIYAEHFLPVMVMKDQVKIGFSWNSSKEGNSIEIVKDQHKFLELLAPFFNKAIESSCKFITYKINKKKAFDFIHRYIHQEVDVNDCALIVKILESLRYTTVNTDVCDIYNDREKRFKSKSEILTNKNFELNFSLPKPFKILACKKIYLPSKNEWSKITEKFSDYLGKDNIKNWKEIIYNSLNLNRKTTKKLNHAGTKRVYSLPILKNASGGIRIKRYTDEMEEFYQLLEVNTPQTVKRKGFALSEKGEVMWNKPITVDSYIGKNLTLLEKNYKNVCIGDNFVPMKENRMVYKNEKTEVYISPSSDSRRLVIIKQPFDEFNKCLKNKYKNYLELPSTLVLSGDEIKIYVKNMKNDFIGNPRVETKNNKKTGKIVMLSIGKLVRYCYMSTTCDSLMKTAYDCALS

SEQ ID NO: 64 - protein, 1434 aa, Bacteroidetes oral taxon 274
MKNILGLDLGTNSIGWAYVKQAQNDSEKSEIAELGVRVNPLTVDEKTNFEKGKPISTNADRTLKRGARRNLQRYKLRRQELIELLKDYQVISDKTILAEDGKETTFETLRLRVKSAKEQVSLEELARILLMINKKRGYKSSRKAKNEDEGQLIDGMEIARRLYDENLTTGQLSLQLLKEGKKSLPDYYRSDLQHELDKVWNFQKQFHPDILTDEFYTSIQGKGQKATRESFSSKYGIDTAENKGSREEKKLQAYQWRADATHKELTKEELAFVITEINNNINNSSGYLGAISDRSKELIFANETVGEYLWKQIQNDPHTSLKNQVFYRQDYFDEFERIWETQSGFYPQILTESLKNELRDILIFYQRKLKSQKALVSICEFESKEIPLKDKQGNPISKNGIPVTKLVGPKVAPKSSPLFQEFKIWQNLNNVLVRPKGSRKRKVTTNQQSTLLEGQEPVFELNLEQKELLFEELNLKGNLKTDYCLELIGYSAKEWEMNYPTLEGNKTNKALYEAYLKIIDSEGYDAKKLLKVKTDKDDINLDDIKVSASEIKTMISDIFNELGINTKILDFDAELERKQFEAQASYRLWHLLYSYEGDDSKSGNELLYRLLEDKFGFKREHSKTLANVSLLSDYGNLSTKAIRTIYPYIKENKFSTACELAGYRHSKLSISKEENENRTLKDTLDVLKKNSLRQPVVEKILNQMINLINELIEKHSEKDEKGNIVKYFKFDEIHIELARELKKNAEERRELDSKVREGKDRNEKIITILKSEFGLPYPTKNDITRYRLYEELKDNGYKDLYTNTYIPREKLFSKEIDIEHIIPKSRLFNDSFSNKTICYRQDNLNKGERTAYDYIEGLGKTQLDEYLNRVENLYTNKFITKAKYRNLLKKESEIGDGFIERDLRETQYIAKKAKEMLLQITRHVVSTTGSITDRLRDDWELVNVMRELNLPKYKVLGLTEIQERKNGQTVEVITDWTKRNDHRHHAMDALTVAFTKHSHIQYLNFLNARKDEKHKEYSNIMGIQQLETEKTTDKDGKDRRVFKTPIPNFRQVAKEHLESILISHKTKNKVVTRATNKIAGSKKQQETLSPRGQLHKETVYGKYRRYVQKEEKIGSKFDLQTIERVANPLYKRLLTKRLEENGGDPKKAFTGKNALAKSPIYLDETQTQQLPEKVKLVWLETDFSIRKDITPDNFKDEKSIDKVLDEGIKRILKDRLKSFDGDAKRAFTDLEQNPIWLNKEKGIAIKRVTISGVSNAEPLHTKKDHLGNEIFDDTGKPIPVDYVSTGNNHHIAIYRDENGNLQEKAVSFFEAVTRANQGLPTVDKTYNQHLGWQFLFTMKQNEMFVFPNKETGFDPQEIDLLDPKNKKLISPNLFRVQKISTKNYFFRHHLETSVETHNALNGVTYKSQLGLNGITDIIKVRINHLGDIVHIGEY

SEQ ID NO: 65 - protein, 1123 aa, Francisella tularensis; identical to SEQ ID NO: 12

SEQ ID NO: 66 - protein, 1372 aa, Legionella pneumophila; identical to SEQ ID NO: 17

SEQ ID NO: 67 - protein, 1409 aa, Wolinella succinogenes
MLVSPISVDLGGKNTGFFSFTDSLDNSQSGTVIYDESFVLSQVGRRSKRHSKRNNLRNKLVKRLFLLILQEHHGLSIDVLPDEIRGLFNKRGYTYAGFELDEKKKDALESDTLKEFLSEKLQSIDRDSDVEDFLNQIASNAESFKDYKKGFEAVFASATHSPNKKLELKDELKSEYGENAKELLAGLRVTKEILDEFDKQENQGNLPRAKYFEELGEYIATNEKVKSFFDSNSLKLTDMTKLIGNISNYQLKELRRYFNDKEMEKGDIWIPNKLHKITERFVRSWHPKNDADRQRRAELMKDLKSKEIMELLTTTEPVMTIPPYDDMNNRGAVKCQTLRLNEEYLDKHLPNWRDIAKRLNHGKFNDDLADSTVKGYSEDSTLLHRLLDTSKEIDIYELRGKKPNELLVKTLGQSDANRLYGFAQNYYELIRQKVRAGIWVPVKNKDDSLNLEDNSNMLKRCNHNPPHKKNQIHNLVAGILGVKLDEAKFAEFEKELWSAKVGNKKLSAYCKNIEELRKTHGNTFKIDIEELRKKDPAELSKEEKAKLRLTDDVILNEWSQKIANFFDIDDKHRQRFNNLFSMAQLHTVIDTPRSGFSSTCKRCTAENRFRSETAFYNDETGEFHKKATATCQRLPADTQRPFSGKIERYIDKLGYELAKIKAKELEGMEAKEIKVPIILEQNAFEYEESLRKSKTGSNDRVINSKKDRDGKKLAKAKENAEDRLKDKDKRIKAFSSGICPYCGDTIGDDGEIDHILPRSHTLKIYGTVFNPEGNLIYVHQKCNQAKADSIYKLSDIKAGVSAQWIEEQVANIKGYKTFSVLSAEQQKAFRYALFLQNDNEAYKKVVDWLRTDQSARVNGTQKYLAKKIQEKLTKMLPNKHLSFEFILADATEVSELRRQYARQNPLLAKAEKQAPSSHAIDAVMAFVARYQKVFKDGTPPNADEVAKLAMLDSWNPASNEPLTKGLSTNQKIEKMIKSGDYGQKNMREVFGKSIFGENAIGERYKPIVVQEGGYYIGYPATVKKGYELKNCKVVTSKNDIAKLEKIIKNQDLISLKENQYIKIFSINKQTISELSNRYFNMNYKNLVERDKEIVGLLEFIVENCRYYTKKVDVKFAPKYIHETKYPFYDDWRRFDEAWRYLQENQNKTSSKDRFVIDKSSLNEYYQPDKNEYKLDVDTQPIWDDFCRWYFLDRYKTANDKKSIRIKARKTFSLLAESGVQGKVFRAKRKIPTGYAYQALPMDNNVIAGDYANILLEANSKTLSLVPKSGISIEKQLDKKLDVIKKTDVRGLAIDNNSFFNADFDTHGIRLIVENTSVKVGNFPISAIDKSAKRMIFRALFEKEKGKRKKKTTISFKESGPVQDYLKVFLKKIVKIQLRTDGSISNIVVRKNAADFTLSFRSEHIQKLLK

SEQ ID NO: 68 - protein, 1372 aa, Legionella pneumophila; identical to SEQ ID NO: 17

SEQ ID NO: 69 - protein, 1123 aa, Francisella tularensis; identical to SEQ ID NO: 12

SEQ ID NO: 70 - protein, 1123 aa, Francisella tularensis; identical to SEQ ID NO: 12

SEQ ID NO: 71 - protein, 1445 aa, Unknown
  source: /note="Description of Unknown: MH0245_GL0161830_1 Cas9 sequence"
VCTVKAQGLYLFASQTEVLFVKLIHNRFNIHIREHKMTVKSTLAVDMGGRYTGIFSYTTDSGFPKAKEARAYVLNMPDNDALTYSMAARTQTRHRIRSQQRFVLARRLTYILIEGKLKRKLSPREKEAISSLLRRRGYSRLESELDLSVLQGVESGFFKCFLPNFDEDENLLTQWTSLTDGYLQNNSDSRRQIQIFLESSKDSKEFLTVVKSQHQDTKEYKNALKVMRDDAESMIEQSMFGHKHRRLYLEAIAQDIPRDSRLKPIIEAFSGVEKFHHFIGNLSNLQLRALRWYFNDPSMKNNVFDKERLKSVLVRAYQFFHYPKDLTQQRAEVLNAYEGATDILETLQTLNPELTIPPYEDQNNRRPPLDQTLWLSPRLLDQRYGDTWEIWVQNLLRSPLSKGIDENLDTILITTDRKARLLERQSGRLIHYTSQKLYHSYVLQRLLDRTVENDAYLLKTLVSSNRGNSNEIHQAQERLTRDLGSQHIKKFLDFVRQYYDEVDKAKRGLWFIVEKPLMERADIHPPMKNDSVILRLVGNILCVSDLVDLSFWTRKVKGQSTVRSLCTAIEKTRKEYGNSFNYLYQRALYLQSKGKKLSAEDKDFIKLQSNVLLVSDVIAEALDIKEEQKKKFANPFSLAQLYNIIETEKSGFISTTLAAVDENAWRNNLQGKARCVQLCADTVRPFDGALRNILDRQAYEIAKLKAEELLSTELKNQTIDLVVLLESNQFAFSASLAEVKKSANTAAIRQKVAKAQKRQQDRWLSKDERIKSASRGLCPYTGKNLGDKGEVDHIIPRSLSMNYMGSILNSEANLIYCSQEGNQLKLNGRKKLSDLADNYLKVVFGTADRGTICKYIEKSVSELTDAKIVQFELLDRSQQDAVRHALFLEDFSEARRRIIRLLGKINTARVNGTQAWFAKSFITKLRELTKEWCANNQITLAFDLYRLDAQTVSQDYRKKFALINKDWAKPDDKKQPIASHAIDAFCVFAAAKDKRNIANVLGVFDEVAEEQNLKTIAQLMPSEVNLISPKRKSILDKNEVGSRALMKEGIFAEHFLPILVRGDDCRIGFDWSESGSVKVKDADKLFGVLDGLLKQSQKRSVNGFETYTVDRIKAFELLHDVFIRPCSQKMLEQAEVLEKLHYITQNISVTSVYDAVNRQFKCREEILKDKDFDIKVDLGNRFGSAKGKITLPAKREWEKLVNRSELKNLIKDKLSDKGSEKTPDGETLIYDIFRSIPVQKLSHKATRRVWSLPKIPSISSGVRIKRKDSNGNDIYQLYMLNDTKCKGFVVNEKGVIDWSSDLVADLYKQPTLTILNGRYLKADQYVRMDQWYEVDCGRDDVIVKMCPGTSGRRYIEITQSKKQFEDWTGYISGSFWNYPVTIKLSSQQIANFVKNSQMPLLGKPRSGQITVITLGNTLKYWYCVESKNSMMNEAYQKAYLVHFNQ

SEQ ID NO: 72 - protein, 1435 aa, Unknown
  source: /note="Description of Unknown: O2.UC1-1_GL0148428_1 Cas9 sequence"
MTQSERRFSCSIGIDMGAKYTGVFYALFDREELPTNLNSKAMTLVMPETGPRYVQAQRTAVRHRLRGQKRYTLARKLAFLVVDDMIKKQEKRLTDEEWKRGREALSGLLKRRGYSRPNADGEDLTPLENVRADVFAAHPAFSTYFREVRSLAEQWEEFTANIGNVEKFLGDPNIPADKEFIEFAVAEGLIDKTEKKAYQSALSTMRANANVLTGLRQMGHKPRSEYFKAIEADLKKDSRLAKISEAFGGAKRLARLLGNLSNLQLRAERWYFNAPDIMKDRGWEPDRFKKTLVRAFKFFHPAKDQNKQHLELIKQIENSEDIIETLCTLDPNRTIPPYEDQNNRRPPLDQTLLLSPEKLTRQYGEIWKTWSARLTSAEPTLAPAAEILERSTDRKSRVAVNGHEPQPTLAYQLSYALQRAFDRSKALDPYALRALAAGSKSNKLTSARTALENCIGGQNVEKFLDCARRYYREADDAKVGLWFDNADGLLERSDLHPPMKKKILPLLVANILQTDETTGQKFLDEIWRKQIKGRETVASRCARIETVRKSFGGYFNTAYNTAQYREVNKLPRNAQDKELLTIRDRVAETADFIAANMGLSDEQKRKFANPFSLAQFYTLIETEVSGFSATTLAVHLENAWRMTIKDAVINGETVRAAQCSRLPAETARPFDGLVRRLVDRQAWEIAKRASTDIQNKVDFSNGIVDVSIFVEENKFEFSASVADLKNSQHAKDTKKNKRTKNKMLSEAEKLETRWLNKNERIKKASRETCPYTGQRLAEGGEIDHILPRSLIKDARGIVFNSEPNLIYVSSRGNQFKKDQRYSLSNLHTDYLKKIFKTSNIAAITAEIEDVVTKLQQTHRLKFFDLLNEHEQDCVRHALFLDDGSEARNAVLELLATQRRTRVNGTQIWMIKNLANKIREELQDWCRTTNNRLHFQAAATDVSTAKNLRLKLAQNQPDFEKPDIQPIASHSIDALCSFAVGSADAERDQDGFDYLDGKAVLGLYPQSCEVIHLQAKPQEEKSHFDSVAIFKEGIYAEQFLPIFTLNGKIWIGYETLDAKGERCGAIEVSGKQPEELLTMLTPFFNKPVGDLSAHATYRIQKKPAYEFLAKAALQPLSAEEKRLAALLDALRYCTSRKSLKSLFMAANGKSLKKQEDVLNPELFQLLFQLRVELKGEKAFKLNGSLKLPVEQDWIRICNSPELIDAFGKACTDAELTSKIARIWKRSATRDLAHAPVRREFSLPVIDKPSGGFRIRRTNLFGDELYQVHAINAKKYRGFASADCNVDWSKGILFNELQHENLTECGGRFIISADETSMSDWRKVLSEDNLGIWIAPGTERRRYVRVETTFIQANHWFKQSVENWAITSPLSLPASFKIDKPAEFKKAVGTELSELLGQPRDKIFIENIVNAKRIRFWYTVRNSNKKMNESYNNASKS

SEQ ID NO: 73 - protein, 1428 aa, Unknown
  source: /note="Description of Unknown: MH0275_GL0111719_1 Cas9 sequence"
MGKTHIIGVGLDLGGTYTGTFITSHPSDEAEHRDHSSAFTVVNSEKLSFSSKSRTAVRHRVRSYKGFDLRRRLLLLVAEYQLLQKKQTLAPEERENLRIALSGYLKRRGYARTEAETDTSVLETLDPSVFSSAPSFTNFFNDSEPLNIQWEAIANSPETTKALNKELSGQKEADFKKYIKTSFPEYSAKEILANYVEGRRAILDASKYIANLQSLGHKHRSKYLSDILQDMKRDSRITRLSEAFGSTDNLWRIIGNISNLQERAVRWYFNDAKFEQGQEQLDAVKLKNVLVRALKYLRSDDKEWSASQKQIIQSLEQSGDVLDVLAGLDPDRTIPPYEDQNNRRPPEDQTLYLNPKALSSEYGEKWKSWANKFAGAYPLLTEDLTEILKNTDRKSRIKIRSDVLPDSDYRLAYILQRAFDRSIALDECSIRRTAEDFENGVVIKNEKLEDVLSGHQLEEFLEFANRYYQETAKAKNGLWFPENALLERADLHPPMKNKILNVIVGQALGVSPAEGTDFIEEIWNSKVKGRSTVRSICNAIENERKTYGPYFSEDYKFVKTALKEGKTEKELSKKFAAVIKVLKMVSEVVPFIGKELRLSDEAQSKFDNPYSLAQLYNLIETERNGFSKVSLAAHLENAWRMTMTDGSAQCCRLPADCVRPFDGFIRKAIDRNSWEVAKRIAEEVKKSVDFTNGTVKIPVAIEANSFNFTASLTDLKYIQLKEQKLKKKLEDIQRNEENQEKRWLSKEERIRADSHGICAYTGRPLDDVGEIDHIIPRSLTLKKSESIYNSEVNLIFVSAQGNQEKKNNIYLLSNLAKNYLAAVFGTSDLSQITNEIESTVLQLKAAGRLGYFDLLSEKERACARHALFLNSDSEARRAVIDVLGSRRKASVNGTQAWFVRSIFSKVRQALAAWTQETGNELIFDAISVPAADSSEMRKRFAEYRPEFRKPKVQPVASHSIDAMCIYLAACSDPFKTKRMGSQLAIYEPINFDNLFTGSCQVIQNTPRSFSDKTNIANSPIFKETIYAERFLDIIVSRGEIFIGYPSNMPFEEKPNRISIGGKDPFSILSVLGAYLDKAPSSEKEKLTIYRVVKNKAFELFSKVAGSKFTAEEDKAAKILEALHFVTVKQDVAATVSDLIKSKKELSKDSIENLAKQKGCLKKVEYSSKEFKFKGSLIIPAAVEWGKVLWNVFKENTAEELKDENALRKALEAAWPSSFGTRNLHSKAKRVFSLPVVATQSGAVRIRRKTAFGDFVYQSQDTNNLYSSFPVKNGKLDWSSPIIHPALQNRNLTAYGYRFVDHDRSISMSEFREVYNKDDLMRIELAQGTSSRRYLRVEMPGEKFLAWFGENSISLGSSFKFSVSEVFDNKIYTENAEFTKFLPKPREDNKHNGTIFFELVGPRVIFNYIVGGAASSLKEIFSEAGKERS

SEQ ID NO: 74 - protein, 1427 aa, Unknown
  source: /note="Description of Unknown: MH0221_GL0020823_1 Cas9 sequence"
MGKTHIIGVGLDLGGTYTGTFITSHPSDETEHGDHSSAFTVVNSEKLSFSSKSRTAVRHRVRSYKGFDLRRRLLLLVAEYQLFQKKQALTPEERENLRIALSSYLKRRGYARTEAETDVSVLESLDPSVFSSAPGFTNFFNDSEPLNIQWKVISNSPETARALNKAVSGQKEADFKKYVKTSFPEYSAKEILANYVEGRRAILDASKYIANLQSLGHKHRSKYLSDILQDMKRDSRISRLSEAFGSIDNLWRIIGNISNLQERAVRWYFNDAKFEQGQEQLDADKLKNVLIRALKYLRSDDKKWSASQKQIIQSLEQSGDVLDVLAVLDPDRTIPPYEDQNNRRPPEDQTLYLNPRALSSEYGDKWKSWANKFAAAYPLLTDDLAEILKNTDRKSRIKIRSDALPDSDYRLTYILQRALDRSIALDECSIRRTAEDFENGVVIKNEKLEEVLSGHQLEEFLEFANRYYQETAKAKNGLWFPENALLERADLHPPMKNKILNVIVGQALGVSPAKGTEFIEEIWNRKVKGRSTVRSICNAIENERKTYGPYFSDDYKFVKTALKEGKTEKELSKKFASVIKVLKMVNEVVPFIGKELRLSDEAQSKFDNPYSLAQLYNLIETERNGFSKVSLAAHLENAWRMTMTDGSAQCCRLPADCVRPFDGFIRKAIDRNSWEVAKRIAEEVKKSVDFTNGTVKIPVAVEANSFNFTASLTDLKYIQLKEQKLKKKLEDIQRNEENQEKRWLSKEERIRADSHGICAYTGRPLDDVGEIDHIIPRSLTLKKSESIYNSEVNLIFVSAQGNQEKKNNIYLLSNLAKNYLAAVFGTSDLNQITNEIESTVLQLKAAGRLGYFDLLSEKERACARHALFLNSDSEARRAVIDVLGSRRKASVNGTQAWFVRSIFSKVRQALAAWIQETGNELVFDAISVPAADSSEMRKRFAEYRPEFRKAKVQPVASHSIDAMCIYLAACSDPFKTKRMGSQLAIYEPINFDNLFTGSCQVVQNTPRSFTDKTNIANSPIFKETIYAERFLDIIVSRGEIFIGYPSNMPFEKKPNRISIGGKDPFSILSVLGAYLNKAPSSEKEKLTIYRVEKNKAFELLSKVAGSKFTAEEDKAAKILEALHFVTVKQDVAATVSDLVKSKKELSKDSIEDLAKQKGCLKKVEYSSKEFKFKGSLIIPTAVEWGKVLWNVFKENTAEELKDENVLRKALEAAWPSSFGTRNLHSKAKRVFSLPVVATQSGAVRIRRKTAFGNFVYQSQDTNNLYSSFPVKNGKLDWSSPIIHPALQNRNLTAYGYRFVDHDRSISMSEFRVIYNKDDLRIELAQGTSSRRYLRVEMPGEKFLAWFGENSISLGSSFKFSVSEVFDNKIYTENAEFTKFLPKPREDNKHNGTIFFELVGPRVIFNYIVGGAASSLKEIFSEAGKERS

SEQ ID NO: 75 - protein, 1422 aa, Unknown
  source: /note="Description of Unknown: MH0246_GL0016360_1 Cas9 sequence"
MTQSERRFSCSIGIDMGAKYTGVFYALFDREELPTNLNSKAMTLVMPETGPRYVQAQRTAVRHRLRGQKRYTLARKLTFLVVDDMIKKQEKRLTDEEWKRGREALSGLLKRRGYSRPNADGEDLTPLENVRADVFAAHPAFSTYFSEVRSLAEQWEEFTANIGNVEKFLGDPNIPADKEFIEFAVAEGLIDKTEKKAYQSALSTMRANANVLTGLRQMGHKPRSEYFKAIEADLKKDSRLAKIREAFGGAERLARLLGNLSNLQLRAERWYFNAPDIMKDRGWEPDRFKKTLVRAFKFFHPAKDQNKQHLELIKQIENSEDIIETLCTLDPNRTIPPYEDQNNRRPPLDQTLLLSPEKLTRQYGEIWKTWSARLTSSEPTLAPAAEILERSTDRKSRVAVNGHEPLPTLAYQLSYALQRAFDRSKALDPYALRALAAGSKSNKLTSARTALENCIGGQNVEKFLDCARRYYREADDAKVGLWFDNADGLLERSDLHPPMKKKILPLLVANILQTDETTGQKFLDKIWRKQIKGRETVASRCARIETVRKSFGGGFNIAYNTAQYRKVNKLPRNAQDKELLTIRDRVAETADFIAANLGLSDEQKRKFANPFSLAQFYTLIETEVSGFSATTLAIHLENAWRMTIKDAVINGETVRAAQCSRLPAETARPFDGLVRRLVDRQAWEIAKRASTDIQSKVDFSNGIVDVSIFVEENKFEFSASVADLKKNKRVKDKMLSEAEKLETRWLNKNERIKKASRETCPYTGDRLAEGGEIDHILPRSLIKDARGIVFNAEPNLIYASSRGNQLKKNQRYSLSKLDPDYLNKVFKTSNIAAITAEIEDVVTKLQQTHRLKFFDLLNEHEQDCVRHALFLDDGSEARNAVLELLATQRRTRVNGTQIWMIKSLANKIREELQDWCRTTNNRLHFQAAATDVSTAKNLRLKLAQNQPNFEKPDIQPIASHSIDALCSFAVGSADAERDQDGFDYLDGKAVLGLYPQSCEVIRLQAKPQEEKSHFDSVAIFKEGIYAEQFLPIFTLNGRIWIGYETLDSKGERCGAIEVSGKKPEELLSMLAPFFNKPVGDLSAHATYRIQKKPAYEFLAKAALQPLSAEEKRLAALLDALRYCTSRKSLKSFFMAANGKSLKKREDLLKPKLFQLKVELKGEKAFKLNGSLTLPMKQDWLRICNSPELADAFGNPCSADELTSKLAQIWKRPVMRDLAHAPVRREFSLPVIDNPSGGFRIRRTNLFGNELYQVHAINAKKYRGFASADSNVDWANGILFNELQHENLTECCGRFITSADVTPMSEWRKVVTEDNLRIWIAPGTEGRRYVRVETTFIQASHWFEQSVENWAITSPLSLPASFKVDKPAEFQKAVGTELSELLGQPRSEIFIESVGNAKHIRFWYIVVSSNKKMNESYNNASKS

SEQ ID NO: 76 - protein, 1413 aa, Unknown; identical to SEQ ID NO: 63
  source: /note="Description of Unknown: MH0124_GL0052249_1 Cas9 sequence"

SEQ ID NO: 77 - protein, 1396 aa, Unknown
  source: /note="Description of Unknown: T2D-113A_GL0099135_1 Cas9 sequence"
MKSTLAIDLGGRYTGVVSYTSEFGLPSADSLKAYVINTPNNDELTVSVKSRTQVRHRLRSQKRFKLARQLMTLIVQHKVARNLSNSEKEALFGLLKRRGYSRYDSELDLSCLQSIETEPFQSFIPEISEDESLLTQWESFKAGYSTGNVDCINIVRSFASLPDAKQFKEHLKQYSLSKEEVKDYLTALSVLREDALLVEQQSLFGHKHRTQFFDDIYGDIPKDSRLKTIVNDFGGLEPFYRTIGNICNLQLRALRWYFNDPSMKNPYYDDKRLKSVLSRAYHFFHYPKEELEKCRDILSAIESADSALAFLASFDPKKTIPPYEDQNNRKPPLDQTLLLNPRALDLRYGSRWELWVNNLLRAPESKGIDDQLDVILASTDRKSRLQERQTGQIVHYTSKKLYNAYVLHRLLDRTLDNDPYSLRLISKERIGQSNDIHEAMSRLTKDLGSQHLKEFLEFARNYYNEVELAKRGLWSIVQTPLLERADIHPPMKKGTIISRLINNVLCTENVSISQFWHLRVKGTSTVKSICASIERTRKEYGNFFNAEYKKALAKHRVKEKLDAQDKEFIKIADNVQLTSQRIAQALNLSEEQREKFANPFSLAQLYTIIETEPNGFIKTSVAVNDENAWRTNLAGHARCVRLSSDTVRPFDGAVKKTLERQAYELAKLKFSELQNSVKNDCTVDVTLLIESNEFAFTSSMAEIKKSDKAKAIRNKADRAMKRQDQRWQNKNNRIKTASRGLCPYTGQPLGDNGEIDHIVSRSASLMLYGDILNSEPNLIYCSQKGNQLKSNRIKTIQDLASNYLEKVFGTSNFSAVEELICSTVSRLSDNDIVQFDSLTQQEQDAVRHSLFLNSANPVNRRVRQALAKQFKSRVNGTQAWFARQFIKTLQELSANWCKTNNISLTFDVYRLPSQSVQGDYRAKIATSAPELAKPDSAQPIGSHAIDALCVFGAALDNQKIAKRMGLDNLTLSDSLEHLTALLPQSVDIINIKRKSLFDKDDLQSISWFKETIYAEEFLPIMVKKDETRIGFSWNDQYSLKVKHGDILIKTLSSFLNEAKPVREYEIQTFTINREKAFELLHKVFTAPCTSEECQIADLLEGMSYVTQKTPISDFFDEKSRSFKLNKADKLFSIKIKLDRRFGASGTIFLPCQKDWENEIKKINQFTGQLSNSQNGQDVVLSMKKNLKRSALKHRRTRRVWSMPIVPSGLSAAIRLNRKSHDGRNIYQLQMIKNAKYKGLCVDNEGQIDWNQLLVADIYKQNSLTLRAERYLDSQKFISMDHWLDIDIGIPEVKVRMSPGEANRRHICITQSRQQFENWIGCTLGSMWTMPATKKLNEEELANFIKNANSPILGSPRDGVIKFARLGETITYYYCSQSANAQMKNAYQKAYLASLAK

SEQ ID NO: 78 - protein, 1231 aa, Unknown
  source: /note="Description of Unknown: MH0426_GL0066699_1 Cas9 sequence"
MQNLHRTAVGIDLGAKYTGVMIADTVPGISLRQEDLTAFTVVMPDAEKMMLAQTQRTATRHRLRGKKRFNLARRLTLLVINEKLTAAGVVLPETVRLRMIEAVNGLLRRRGYSRIESEVNLQVLEDLDPQCFAECDLLKSFFSEATRSLMDQWEELTNDMGRIRDLDRVLQDQTKQDVKEAFKQQGLEKEMLKSAMEAVASVKEAAHDLVTQQFMGHKPRATYLQHLLSDLKRGDSRLTKVIEAFGGVERFHHVIGNISNLQLRAERWYFNAPHMIKGDCWEPCRLKQSVIRAFKYFHPSQEGNEKTRLAELIRELESTDDILEALCTIDPQRTIPPYEDQNNRRPPVDQTLYLSPEKLNDRLGERWMIWAKSFAKADPCLEEELDEILDLTDRRSRIARDGTLVLSVLQYRFSYVLQRVLDRSKLLDPFAIRALAHGAVLSASRHQLAMVIGGQHVDEFLAFAAEYYREIEGAKSGLWMPQTGSYLERSDLHPPMKKKILPILVGNVLQKTDKEGERFMADIWNAKVGGRSTVRSVCAVIEKTRKDNGGDFNRLYQRALLRRKLGQKLSKEDKVFAALSDKVDAVTEVIANTLGLSEDEAAKFANPYSLSQLYNLIETERDGFTSVSVAAHRENNWRMRLTECTDKDGSKTWSANCSRLPADAARPFDGVVRRVIDRKAWEIAKRVAESVRRHVTFQNGTVEIPLFVEENRFEFSASLAELKHNAAARKKMLDRSEGQTKRWQSKIERIKAASRGVCPYSGKAIKANGEIDHIIPRSLTKKNAGTIFNAEPNLIYVSQEGNQRKGNQGYRLSDLNATYLTAVFRTNSVSEAQATIEKTVTNLQKQGRLVFFDLLSESEQDCVRHALFLEDFNPAKLAVLEMLGNQRKARVNGTQMWLVRCLVEKLGEELASWCERTGNQIQFNATAVLPEVSMQLREALGEVDATMKKTDVQPVASHTIDAFCALAVGCDGLFVDEPDLAVPENMVALYPENCSIVQIQRKPLEEKSQFGGVPLFKDGIYAEHYVPLFTLDGRIYAGYISKPSEDGVMPGAVEVCGKDPVQLLQTLSPYLTRPFEGEVSKNESYRVDRLKAAALLAEVAHQCSSEQKVAAAGVLEGLSYCTKRCPVIGAFWDSVKKKLVAEDVALKDDKFEVKQQERRPGHHVLLARNLSSEKPATETSGSDNGRSGIRGACNLSSEKPATETTSLLFRTWCATTCNLSSESYFSKLRLH

SEQ ID NO: 79 - protein, 1037 aa, Unknown
  source: /note="Description of Unknown: DOM012_GL0013449_1 Cas9 sequence"
VVHSKKIIIHPQTEFIMNKKTVYSNIAIDLGGKYTGCVSYTSSILPSADDINAFIIEMPDDGNGIKYTVKDRTQKRHVVRSLDRFKKARKLIYLVISSIIRRELTADENEAISSLMKRRGYTRLEAEIDLDILKDCPIDLFASYMKDLFDESQSLYEQFNQKCCDLDSAKAMKKALSSEELKQAMDSSELDKIEKKIYKSAFNTMVEAADNIINTCEFGNKHRKQYLSDIKVDINKDSRLTDIVKAFASSEKLYRCIGNISNLQLRALRWYFNDIDMKGEPKWISERFKKVWARAYKYFHYPKEDQTKARELIKKIESSEDAISLLSSIDPLKTIPPYEDQNNRNPPTDLTLLLSPKALDDKYADLWDAWAEKFANLYPNLTYQLKDIVKATDRKSRIEQKNSSSYTQSKIFNSYVIQRLLDLSTNEDEPITLLRKWVRDPSNPNLARTVKIIQSVVEDHEDDFYKLAQSYYNEVEKAKSGLWSVVEDPLLEISGIHPPMKNKVISTLVGNVLGINNDFDYEKFLEVWKSPIKGRKTLKSICRDIEELRKDYGNTFKVEYDYAIYSAKDKKKTLTSDQKKLVEIYKTIEEISPLLWSNISQDPLSEIKFNNPFSLSQLYTLIETDTLGFSSNCVAVNKENNARMQFLSGNCALCSRLPTESVRPFDGAVGKILERQAYEIAKAKSSEIKELDGLNDAVINVGILIEQNKFEYSASLATIKNSKYKKKIQKRAKSGVSRQLEQWKSKEQRIKDASRDLCPYTGEPISELSNGEIDHIIPRSFTKASMGTIFNSEANLIFCSKDGNQTKKENVYTLRDLSPNYLNEIFGLSDILKIQQEIECTVANVNEKNPRFLFDMMTPKEQVCCRHALFMPQSKAYRLVVSSLARSYSTRVNGTQSYFVKVIISRLRNELSSWLKSNRNTLNFFAYKVDPSDVHSTRDDLSKLNALLKKQKNQPITSHAIDALCVLSAASTVEYISENISENGKISFLSNIENLKKVVPNQYRVMRIEKNHCLIKMFLNQVNSLKIRYMQSISLLL

SEQ ID NO: 80 - protein, 971 aa, Unknown
  source: /note="Description of Unknown: MH0053_GL0028252_1 Cas9 sequence"
MSKKTVYSNIAIDLGGKYTGCVSYTSSILPSADDFNAFIIEMPDDGNGIKYTVKDRTQKRHMVRSLDRFKKARKLIYLVTASIIRRELSSDEKEAISSLMKRRGYTRLEAEIDLDILKECPVDLFTLYLNDLFDENQSLYDQFNQKCCDLDTAKAMKKALASEELSIALKSSDLGKTEKTLYKSAFNTMVEAADNIINTCEFGNKHRKQYLSDIRFDINKDSRLTDIVNGLGNSEKLYRCIGNISNLQLRALRWYFNDISMKGNPKWIPEKFKKVWVRAYKYFHYPKEDQLKARALIDNLESREDATSLLFSIDPLDTIPPYEDQNNRNPPTDLTLLLSPKALDARYSKVWENWAEKFASLYPNLTYQLEDIVKNTDRKSRIELKNSNSYTKSKVLHSYILQRLFDLSANKDEPVTLLRSWVKDPSNSKLLSTAKIIHSVVGEREDDFYKLAQSYYNEVEMAKSGLWTVVESPLLEISEIHPPMKNKVISTLVGNVLGINNDFDYEKFLEVWKSPIKGRKTLKSICRDIEELRKNYGNTFKVEYDYAIYSAKDKKKTLTSDQKKLVEIYKTIEEISPLLWSNISQDSLSEIKFNNPFSLSQLYTLIETDTLGFSSNCVAVNKENNARMQFLSGNCALCSRLPTESVRPFDGAVGKILERQAYEIAKAKSSEIKELDGLNDAVINVGILIEQNKFEYSASLATIKNSKYKKKIQKRAKSGVSRQLEQWKSKEQRIKDASRDLCPYTGEPISELSNGEIDHIIPRSFTKASMGTIFNSEANLIFCSKDGNQTKKENVYTLRDLSPKYLNAVFGTADSVKIKQEIDSTVAILSDKNPRLLFDMMNQREQDCCRHALFMPHSKAYQIVVSALARSYSTRVNGTQSYFVKAIISKLRNELSSWLKTHNSTLNFFAYKVDPSDVHSTRENLSKSNPFLKKQENQPITSHAIDAMCVLSAASNVESISENISENGSIA

SEQ ID NO: 81 - protein, 1422 aa, Burkholderiales bacterium
MESSKYIFPVGIDMGAKYTGVFMLSHLDGVLPTAADATAMTIVNSDKIHYSMKHRTAVRHRVRSKKRFVLARRLLNLIVDHQLMKAGFVLSAQEKSQLTEALSGYLKRRGYSRIETEIDLDSLNDVDPIVFAMCPGFEDFFSSDIELLTQWNSLTADLSEVNKINSNKKIPDVKTFKKYVKDNFPDYSSKESLERYLEARKTIIEAARQISELTSLGHLHREKYLDNILHDMGRDSRLKKIGEAFGGICRFWNLIGNLSNLQLRALRWYFNDPWIEKVKPVETENSQPLNEQKLKDIWVRAYKYFHPDPENKARISDVIRALSKADDIIDCLCELDCKSTIPPYEDQNNRRPPLDYTLYLNPAKLTEVYGDSWRSWASRLVNADSDLQDNLDVILQNRDRKSRRTTQDSLDFRLSYILQRALDRSKVNDIFEIRKILSSPTLYSEAATRNLLLFKTLEEQNFGPFLDFARRYFYEVAKAQKGLWNEKESILERSDLHPKQKKKVLDRLVANVLRVDEETAKRFIADVWNGKVKGNSTVKSICTRIEQLRKDRGSAFNLEYQSALTKAALGNEKLDSEEKEYVKLKQDVSLTAAFIGEQLGLSDEQRTKFANPFSLAQLYTIIETERSGFTKITTAALLENAWRLTFKNGAAQCGPLPADSVRPFDGYMRRVLERNAREVGKRLIEKIKRDTQDQGAEIVVPILVEENKFNFTASLLELKRLELSDSRLKKKQEKIEKAGEAQKKKWLSKEERIKDDAKGICAYTGAPLNSEGEVDHIIPRSKTIKNYSSIFNSEVNLIFVSRQGNAAKKENLYFLKQLNSAYLTAVFGTSDFSTIESKIESTVQQLIENKRLGYLDLLSQEERNCVRHALFLNPGSDARKEVLSVLGARRKTVVNGSQAWFIRTLRSYLENGLQNWLTETGNKLSFDAFSIPAVTVSSLRSQLGELENSMFKEDIQSVSSHSVDAMCVYAAACGDASAECVLHGDALLADSHSMRAAQLLKKLYPETCQVVQISPKSFSQKDRINNSAIFKDTIYAERFLNIYKKKEEVFVGFDNDKKGSNEKESLTQVKGKNPHLLLQILEPFFEKRNESKDEGTYRIDKTKAFQLMGKAGCALLSNDESRQLSLLNQLHYTTLKQEVLTELVDTASKKIKLKSKYQSNFKREFLLKLELRDRERQFSAKGNIVYPSYKRWQELSEELSNFLTACPEGGLEEVNARLSSLWTTSEKSSVRHKKVKRSMSLPMLASQSGAVRIRRKDFRDGYVYQSIDANQLYYGFSKKDGKILFNSPLPHPRLTTKNLKIYEYQYQPVNECVKMDEWKTVYEKEGVIVEHAPGTKARRYIRATLPFDLYLLWDKELQKAKDKSSLTLPSKVIRETKDFFEEGIYKNEELAQFFPKPRENNKKFTMNIELVGSTVKFSYVTA

SEQ ID NO: 82 - protein, 1278 aa, Campylobacter sp.
MYELSINVDMGAANNGVFIAITNENSIIYKNAFNIYFDKNLTFSKSDRTARRHARRSYDRDRFILRLLNEILPIDGLSQSQIETIYGLFKNRGFNYHNIEFNESLDDDVVEFLNGLDRYIFGLSKNKDEFEQIINEIVVDHSNDEIKKILDTQSQILINIDKENKKAIKASKNIQSLIQSICNEIDKNNKHRISYLKDIKELIYKDCEFIIQKSDKFDNLDEFYNFVGNISNFQTRILRRYFNNKYLDNINFDDAKLKKNIIRNINYMEYITDIQNNNKLNMLNSLKTKSALEYLKSIDPVITIPPYENRKNKNPQKCNTLMLNIDKITPSLANLTYKILNSDDFTHIRRDENGQLISLNDINENNIAKYLQRVLDISKESLIDVALYPRALDNNSKIFADTFRLNSDEIREFKEFARRYYNEVDNAKKGIITNDLLIPCGKNTPHKNRNKNELISALFGKNITKDDVINLEEFMLKNKIKGNRSYKGFFRDLNELKKSYQNSFYHNLNNDEINDKDIQTILELYPKVAQNINNHNSVFEFKHPFDKNNLNTNINYLGQLGDIIYDEKNHGFLKTCKCHTLENLIRSGSQNAICTRLPANSARLINGKIEMYLNRLAYEISTAIKPEILKDISYITINVEMNKFSFENSASDLNLISKRQKSKDMICPYSGQKIDEINCEYDHILPRSKGLYNSRANLIPASSTANLQKGNQSYTLENLHQNYLNSIYKIIKVQNLDEFKNFIDTQMAKININKFTNFDNLNSIEQIALRHALFYKNSDSFTKALEILKLDRIKTHSNGTQKRFVNLLIQKVKDKLNKLNQDIEFSVNFINAELVSAIRSELSKEDKELQKAKIQDSHSHCIDASIVFYYANSKLIKNSKGQREFKYNYNHIKPEYSNKMTMQSKKYLELNSNKISRKKLFDDGVYSLVYENANILKDKEANILLDLGLLHTKENGKKVAITSDFKSGKFYISTHKVFDLLFKAFNEGDIKLLNKLKFLDNHLCSYIRKDIFAIIKDEDKSSMFFNNKNELKVPDAKIKTKNIDKFYHILKANESKIIEIKDGKNILQHQEIKELFKECFYTKQAKRSRNKSRIIYSLPIKAIKSPNYIIRQNGGYAGLVNSDIATKTYIDLDSKNIIKIPFFSKNILPRKIADIINIIELKSKNIKQIYKLLVTKNLPSAIIKLEFIISQANRHNIEVEFDKSQIGDYNLLDQTSRDEFIDKYLKGEFKELLGEPRDKKITIIKDTKNSLIITYCTQTSAIHKKIMLDNLIDETSSS

SEQ ID NO: 83 - protein, 1278 aa, Campylobacter sp.
MNELSINIDMGAANNGVFIAITNEDSIVYKNAFNIYFDKNLTFSKNDRTARRHARRSYDRDRFILRLLNEILPINSLSQSQKEMIYGLFKNRGFNYHNIEFNESLDDDVVKFLNSLDGYIFGLSKNKDEFEQVLNEIVVDHSNDEIKEILETQSQILSNIDKKNKEAIKASKNIQSLLQSIRNEIDKNNKHRISYLKDIKELIYKDCEFIIQKSDKFDNLDEFYNFVGNIANFQTRILRRYFNNKYLDNINFDDAKLKKNIIRNINYMEYITDIQKSNKLNMLNSLKTKSALEYLKSIDPVITIPPYENRKNKNPQKCNTLILNIDKITPSLVNSTYKILNSDDFTHIRRDENGQLISINDIDENNIAKYLQRVLDISKESLMDTALYPRTLDNNSKIFADTFRLNSDEIREFKEFARRYYNEVDSAKKGIITNDLLIPCGKNTPHKNRNKNELISALFGKNITKDDVISLEEFMLKNKIKGNRGYKGFFENLNELKKSYQNSFYHNLNNDEINDKDIQAILELYPKVAQNISNHNSIFEFKLPFDKSNLNTNINYLSQLGDIIYDEKNRGFLKTCKCHTLENLIRSGSQNAICTRLPSNSARLINGKIEMYLNRLAYEISTALKPEILQDISYISINVEMNKFSFENSASNLNLISKRQKAKEIICPYSGQKIDESNCEYDHILPRSKGLYNSRANLIPASSTANLQKSNQSYTLENLDQKYLDSIYEKIKVENLDEFKNFIDTQMAKININKFTNFDNLSSLEQIALRHALFYKDSNSFAKALEILKLDRIKTHSNGTQKRFVNLLIQKIKDRLNSSNQNLEFSVNFINAELVSAIRNELSKEDKELQKAKIQDSHSHCIDASIVFYYANSKLINNSKGQREFKYDYNHIKPEYSNKITMQSKKYLELNSNKIARKKLFDDGVYSLVYENANILKDKEASILLDLGLLHTKENGKKVAITSDLKSSKFYISTHKVFDLLFKAFNDSDIKLLNKLKFLDDHLSFYIRKDIFAIIKDKDKSSMFFTNKNELKEPDTKIKTKNIDKFYHILKANESKIIEIKDDKNILKHQEIKELFKECFYTKEAKRSRNKSRIIYSLPIKAIKSPNYIIRQNGGYAGLSNSAIATKTYIDLDSKNIIKIPFFSKNILPCKIADIINIIKSKSKNIKQIYKLLVIKNLPSAITKLEFIISQANRHDIEVEFDKSQIGDYNLLDQTSRDEFIDKYLNGEFKELLGKPRDKKITIIKDTKDSLIIKYCTQTSAIHQKIMLDNLIDETSSS

SEQ ID NO: 84 - protein, 1248 aa, Campylobacter lanienae
MKSLSINIDMGAINNGIFIATCQDDKIIDKNAFDIKFDKGKLNFSKIDRTLRRHTRRSFDRDRFVLRLLGEILPLENLSNNQKEKLFGLFKNRGFNYLNVNFNAEIDSDNLEILNALDRYYFKDCRVLSDFENSISKIFNELENNEILAFLDDQAQILNQAKEHKNKILNKNINAILEFLESIKNESFKNNKHRKSYLKDIKNEIENSFKDIILKLKIFKNSQELYYFIGNIANFQTRILRRYFNAKFDLVFDDAKLKKNILRNINYLDFISTDEKANKNKILENLNAFSTLEFLKNTDPIVTIPPYENAKNKKPQSCQALVINDEKITPSLKDIAHKILSNSNFECLKTDENGVLADNIKDNEIAKYLQRILDISKGILDDKELYPRLLEKDENAKIFAQEIRLNSVELKEFKDFAKKYYDEVNLAKKGIIKNELLKPCCLHTPHKNKNKNALISALFLKSITQKEIENLEDFFANNKISGNQTFKGFFERLSELKKRYQNRFFHILEHEPTKELEGILKNYKKVMEKIVEHNSNFSFKAPFDDSTISTNFNYLTQLGDIIFDEKSRGFAKTCKFHTLENLIRSSAKSAIASRLASNSARLINGKIEMYLDRLAHEIIKKIDFTDIYNVQINVEMNKFNFESNLSKLGLAKERQKDEESFICPYSGAKISQTNCEYDHILPRSKGLYNSLANLIPTSSTSNQIKSNTKYLLSNLDENYLKYIFAKTQTTDLNSFKAFIDENISKIDENDFTNFKNLSFFEQIAFRHALFLDTDDNSFKKALRLLKLDTIKTHSNGTQKRFINILIEKISKLTKSGIDLNFIDSKLVSSTRKDLAQNDTSIAKQEIQDSHSHCVDASIVFYLANSKIIKGQIEPDYDYFKDIYPKDSDIILPQSKQYLELNQKSQKSKKLFDDSVYSLVYEGKFDEKQKKILTQYELLKENGFVDTHKVFELIFKSFKDKDTIVLKDLKFLDNHLKSYIRKDIFSIFFNEKGELKEAKELKSATKNIDKFYTILSQNQDKIYTIKLDEKAKEKKTLQRNKVIELYKEIFYTKNAKPRARGKNRVTFSLPVYAKDAKYAIKRNSGFAGLKNKDIATKTYIDIDSREILKIPYYSTNVLPIRISDILEILSLQSKNAKQIYKIKIQDNLPKQIVSLDFILSQANRHEVLVSFDKSKLEIQNINDDNGENTFIQKYLCDDFKEFLGKPRDNKIEIIKNNDDILAIKYCVESTSKANKEIIVKALSDETPSA

SEQ ID NO: 85 - protein, 1248 aa, Campylobacter lanienae
MKSLSINIDMGAINNGIFIATCQDDKIIDKNAFDIKFDKGKLNFSKIDRTLRRHTRRSFDRDRFVLRLLGEILPLENLSNNQKEKLFGLFKNRGFNYLNVNFSAEIDSDSLEILNALDGYYFKDCRVFSDFENSISKIFNELENDEILAFLDDQAQILNQAKEHKNKILNKNINAILEFLESIKNESFKNNKHRKSYLKDIKNEIENSFKDIILKLKIFKNSQEFYYFIGNIANFQTRILRRYFNAKFDLVFDDAKLKKNILRNINYLDFISTDEKANKSKILENLNAFSALEFLKNTEPIITIPPYENAKNKKPQSCQALVINDEKITPSLKDIARKILSNSNFERLKTDENGVLADNIKDNEIAKYLQRILDISKGILDDKELYPRLLEKDENAKIFAQEIRLNSTELKEFKDFAKKYYDEVNLAKKGIIKNELLKPCCLHTPHKNKNKNALISALFLKSITQKEIENLEDFFANNKISGNQTFKGFFERLSELKKRYQNRFYHILEHEPTKELEGILKNYKKVMEKIVEHNSNFSFKAPFDDSTISTNFNYLTQLGDIIFDEKSRGFAKTCKFHTLENLIRSSAKSAIASRLASNSARLINGKIEMYLDRLAHEIIKKIDFIDIYNVQINVEMNKFNFESNLSKLGLAKERQKDEESFICPYSGAKISQTNCEYDHILPRSKGLYNSLANLIPTSSTSNQIKSNTKYLLSNLDENYLKYIFAKTQTTDLNSFKAFIDENISKIDENDFTNFKNLSFFEQIAFRHALFLDTDDNSFKKALRLLKLDTIKTHSNGTQKRFINILIEKISKLTKSGIDLNFIDSKLVSSTRKDLAQNDINIAKQEIQDSHSHCVDASIVFYLANSKIIKGQIEPDYDYFKDIYPKNSDIILPQSKKYLELNQKSQKSKKLFDDSVYSLVYEGKFDEKQKKILTQYELLKENGFVDTHKVFELIFKSFKDKDTSVLKDIKFLDNHLKSYIRKDIFSIFFNEKGELKEAKELKSATKNIDKFYTILSQNQDKIYTIKLDEKAKEKKILQRNKVIELYKEIFYTKNAKPRARGKNRVTFSLPVYSKDAKYAIRRNSGFAGLKNANIATKTYINIDSIEILKIPYYSTNVLPISISDILEILSLQSKNAKQIYKIKIVDNLPKQIVSLDFILSQANRHEVLVSFDKSKLEIQNIHDDNDENAFIQKYLCDDFKEFLGKPENNKIEIIKNSDDILAIKYRVDRSSKANKEIIVKALSDEAPSA

SEQ ID NO: 86 - protein, 1422 aa, Turicimonas muris; identical to SEQ ID NO: 81

SEQ ID NO: 87 - protein, 1480 aa, Salinivibrio sharmensis
MSDNALIFPVAIDLGAKTTGVYAAGYSPNTHVGQFNSDSVFKTGFVAEVDDGQTGYQLLQTQRTSTRHARRSRTRNRQAKRLLMLMLKCCLGFDTDKHQIAISHFINRRGYSYVETNIDEAAINEIASDNLGTFFHVLESNGHEALSELLTQTMPVDGLPLFDALQRIAEDKQQLITLQTELQAFTRQDKKQQRALLPLSKAVDFLIAEQSSGAKHRREYFKNIRSDLKKLSDHPERHCRRLFHALHHHKKTTGSDTFDSFYQLLCHINNFDLKLLNSILKRVKSTQSGEQIEVIVAEKFGKWLTKQWRLSSANGADRLQQIRDVQHAWKDYRAQNPQSVIGFFLDTPPECTVPPYESHTNRRPPSCQTLTLNPDLLSRDYPQWRDWLAWLSSTPAMANAVQAYRTQLVAVESAKGNTLIQTDELDARTLQFIFDSAQDKDPFKLNAIWGTWKKQRQQQRQGDEHDKTTDKLAKLLVQSALPASLTENFTSHPVPGDFWHLINRYFQSRRRAREGRYFLHYDNHYPKQHRWQRDGKLLVMCQHRPRQLKHQATRDIAVLLGVPQTQLQQAVDNGQCDDNKALFAKVKGLQAACRQAYQAQKAWGPDLKAMMVSDPELKKLAEKLAPLTAKVATQLALRDEQYDSFCERNQSVFTFAQLFQLVWGDRSGFAKTCPVCSADNANRMAGEDGQPHAARLNTLTMRLIDGGLKRLLTHQAHHIANRLWDHIEHIGQSADTITVPFVIEQNRFDFTENLPTLKGLNKPKPQPQKINPEQAKKDRIKHASQGLCPYSAGSSVGDNGDIDHIIPRSGQYGVLNDEANLIYSSIKGNRQVKKDRQLTLTDLNPDYLKAQFGTADPIAITQQIETTLCGDDADRFSFGRYSQFAALSAEQQTAFRHALFLSAEHPLRMQVISAMQHRNKAKVNGTQRFMAQLLADILTKKAKQKGLAARLKFDYFQVSANGQDEDSTVALRRLMRDLHAGTKYDIQPFEKGKEKQHAYSHVIDATLAFMIAAEKHQGEGALNIHFDENVSIWGQVDENGVLSDALFPQIAVAPENLAPNVRVGPQSNEHRARQLLAGKKPHQVFSQPIFKQNALGLEFYDLAVIDGQLYKGFVEGEDKHFIKANEKVVDKQLNTFLYAVSHHYYRLIQSSDIQVYTADKHKLTALLFETLAAAKDATTFDSNAEANKLARWVCGKSAGSLYFYSTSAGLEEAPSVVKKQPNSRFRKQWLAHYQSWQAKHPDTPEKNGMWIIPTELEADWRQHCDWYLGRPTDDQQPDHRAVKSDTMRAETKSSGAMALVRRQSQGKAIYQLLALDTQKVPKDHSAALALASPNLVLLDKAIFTKGYQTKVEEQQPLAGKTIESSAFFDQAISEQWQLDISTLQVAIVSNTNVQITGLHKDWVAEHLILSGEDSEKAWTKLTSIAISDEAQVMDVFAKASLKAWLTAPCRNDKSVRVKLDDDQVSLTLPYKQPQLRKLVD

SEQ ID NO: 88 - protein, 1470 aa, Leptospira sp.
MREGEGFDMGKEVISPIAIDLGAKNTGVFAATYVPGEFLTNPDIIKEGYLLQMGDIQLSQADRTVKRHQLRGNRRKKLVRRLLFLILKEKFGINEFSKSTSEFLQGLLKRRGFSYISENINEDVLKSADLEFFEQFTQGKITKKSPLLNQLFDISQNLYDAQSLLDCEIFQKNKKDIKSFLRTQEIEVNDDLLDQIESTKSYLETIIKSDIDGHKHRRDYIKNISKDVEAKWKSIQEFSSLNMEPLDFSNLLGHISNLQLKPLRKYFNDPQMAEGNDYWDEERLGTIIRKWLKSLRPSEAKDIQNLRTLLSKIRSNESKIIEILLKTNPELSIPPYEDMNNRRIPSCQTQYLHTPALNQLYPRWKIWTDKLVKDLTDGKELIADAGFDDFRLDSELIILPKVGESYKEIQDRKQARLLQRVLDLSKKVDPYSIRSQSVETKKGLTKKEKSELAGAKDRLDKLLDKDSDAFIGMAKDYYNQLKTIRQGIELSEDISLFHSCEEKTKKKGNNQTESIRTILGINNISDERLETIMDTVWKDRLYGNTTLRSYCNSCEEARKKDGTAFILTLSSVKKKKKLNINITEDHEKKVSGLLDNMHLAVKKICEAFPEIQEISSKRMERDWEDKDYNYLPFANLFSLAQIFNILEGDTRGFSKICNQCIVENKWRGTIVRSGSNLDQGAIASRLNSDTIRQFDGVLRRMTDRLAFEIAYKKKEELKDINRNSKIIIPILTEMNRFEFNLDLGHYKLEARIASRMQKKGNQKNEQALERLESFEDSKKDRIKEASLQICAITGKAIGENGQIDHIIPRSHSKKSNATIFNTEMNLIYLSTGGNVQKGAKFYSIADLHPNYLQAQFGTKDKEQVQKQITEGIESILRIKRKVFRSYRPDEQKILRHSLFIPELFPLVIPLLGEGIMAKANGTQAYLARCLQKRLKDILEKEGFKNFEFSIFHLRSEEISDIRKELSNYKQDYSKPGKGQQQAPGSHILDAVSVLVGSLGNPNIQSILKTDIFSEDKGDMSKEEQAKSIEACLPSQIRILKIDSLPKYRKKNLGSKSLFKEGIFGERFVPLYLHKEMLFIGFDTQMKSGLEIKNNPEKVFDALKPYFMIHNISYNQALELSKKSIIRFPIDRKKAVRYLFDSVKQNTWNDVSEILQGLRYTVSKKDIASQIVDKNSKIQDKEEILKETQKNIKVEISKLELTGELLKGVFEYPGITDWNTFLKDFYKQKGIKTGEKLNFEIYDKFCREYFNIIKQDKQHQKVRKMFSLPVIDNPSGGFRIKRKNYDGTEIYQVATADDGYAAGFTVIDGNVEIYNKKLGRALPSLEKAESISTLQNKNNSSDDFVFMDDWREIDISEVETLKRLCIQPNSLPRARIYAEVNITDFKKVCENIDSLSIYKIPQVLKLKDNIKISENFKILKEPRGDIRVKLIDAKKGILGIEYIIQSTDKAISELYNLGKPIGSPYATPDSN

SEQ ID NO: 89 - protein, 1407 aa, Moritella sp.
MKGLVLKIISPIAIDMGAKYTGVYLTQYEQGDVLENANPEGLVVMHTENMQYSQVDRTQRRHQTRTAKRRKMAKRLLWLVLAEHYNLSFKNCDVKEREAINSLLNRRGFTYLSEDVDEALLQEIDSSAFHLYFNSDIPAATNLFEVYQVITTSVETAKSFQNSDEYAISVKDFSKRLEGDYKEQKKQLESGFKAFRQGVDSFINAEQDGHKIRSAYLANIKKDLSEHEDYQFLRTRLTVSIDAFSNFVGHISNLQLRVLRRYFNDENMAYGDIWDFERLHKVFYRNVSGMHYKDNTQDKQNQVTLFSMRAQDIISTFEALDPIVSIPPFEDQNNRRPPKCQSLKLSPTTMIKYLPKWHIIVPQLADDLEARSILVKDGLELNSIKNTNDWAQCLQRILELSYDHDPYLLRRWIGRKDQVGEHTKRAISNFERVIQQQHHADFIVLAELFYAETQAARNSIWFKENSQLLEVCAQKTPHKANQFKELLSGTVNVNLTEDQKEQFEKLWFDNPRIGKRGIKGWCGFAAEMQKEYGNALKEQINRNIWLNENDKKVENKKLIELNKAVESVAKIIADSMNIESKRFANVFDLAKLHNLVEKDQKGFSNNCRCCTKDNAWRGNIVENDEGKDAAFGLRLPADTTRPFDGLLARLIDKQAYQIAQAKVAQLLSEPTNEMVSVPLLIEENKFRFTSSLAEVKKNTKKRKDNEDKAKKREGLWLEKNGRIKEASKNICPYTDKPLYNGGEIDHIISRAESKGRKQTVFNHEANLIYCSVTGNGIKDRQSYSLADLKPKYLTKQFETSNREKIKQRLIALCEPIIAKRELGSFGDLNEDTRQAIRHGLFVDELRPKLIPLLHQSNKTRVNGTQAYLAKLILQKIKLLYKGPIEFSVHYVEAELASRLRVQLGNQYPEFAKPEHQPVASHVIDAAMVMAAGLQQPHTQACLQTAGLDNNGDWLKAILPTEIDVKRIEPKLKFNKKQVHSQTLFKDGIYAEHVIPLVVNDEKFGVGFTADNVAWLKNQEEAPVIWWNALQLYLNKSPETLDDVRKNIGNQTKVYSFNNTAVFELLYKVAKQPCSDEELLSADLLETLIYTSQKVKLQSALYDENNKTYKKITDIVNMKTTDNKGDFTIKLDVKSRYLKTTMRAFESSLIVYPAIASWSNLLEHDFVKAKAGKKEAFDSDSYNRVIKGLFSTIKENTRQHKKVRKNWSLPKLSSPSGGYRARRKNADGSIIWQLFAVEGLSASGFYMIDGKIDFSEAGVAGIKAIDDSKNLTSVKSRYKNIQLPVEPFDNWRRVTIPDKLKGKIKGILLSPNSKSRFRVRIEFSYGQFKENVLPLTDSIELVQAWSQIPAELKMAKGKEWKASFGDLIGTPRSNLFTLVIGTSITLEYIVGSSNTVMKQAYQNGSLID

SEQ ID NO: 90 - protein, 1422 aa, Endozoicomonas sp.
MRYISPISIDFGAKYTGIHNMHYLEGEDPRGSVQNTGCVLVMDDDNLQLSQVGRTQKRHQSRNYKRQDLARRLLIVILKDCFDQDVWQWPVKNREFLFGLINRRGFNRFDDDSLIEIEFCDLSVFESVLPDIAGYEGLEEWLQALAENAAECRLALQRLGRTREFLKTLPEIWKEEKKSIEATHKHIIHFLETSINASEEGHLHRRKYLRNIAADIILEQHGRLASLFQTNSGITPDQFANLVGHISNLQLRVLRRYFNDQNAKPQNGQTDAWREDHFSKQFWRWIKSWHCDEQTKSRWHELIKFKKKGGSVFKLMLTVQPELTIPPYEDQNNRRPPKDKTLFLNPVALNKAYPLWREIVKRLVAAHPELDSDHASTIAHMDAALDQDCILLQRMLDRTSGLDLYKIRALAMGRPDRGNQLKVASENLRLRLNQHAEPFIQSIARPYYLQINEARQGLWVEEDSLLLCLNRTPQRKARQLPTLLGRIVGDLGSHGQEHIQSLKQQWSQRGVIKGARTPKGWCKFAAEAQKDFGNGLKETIRSYRQLQARIKAGDTEEKLLPEAKKLLALEAALPDVARFIAQGLGLAAENSARFANPFSLAQIYNLLESDPSGFSHVSKPSAHENLWRMQYEQSVDGKDCARASVLSADSIRPFDGMLSRILEKQAYSIAKRKLKQIESHEMTSAKVRVPILIEENRFQFAEDLQTIKKNTRKKKDAQKSCESDFIRFEDKEQRICKASKGMCAYTGEDLGRYGEFDHIIPRSYTQKRTGAIFNSEANLIFVSSRGNQQKRDQLYTLAELDDRYLTSQFGSTNRQQIAQAVQDAVTPFLTKGELIGFHNLGLQEQRMIRHALFVPGLRDQVLQLLAGQRKAKVNGTQAWLAKRIIHHIRQGASATIEFDIIKVPTDSVRFCRGVLASRFPAMAKQSPQPVASHAIDAALVSGSLLMEPAIARSLSLAPVDTTTQAEWLKGLLPETIDIQILRKKPLYRKDAPASSPLFKAGLYGERFLPLLVMNDELRVGFTLPNSAKVLDHADNLYALLRPVLVCKDSHELPSTLAELQESLALGQRQILNINRQKAFAYLHEFGQSPTHNDNCLAIEALLYCVQKKKIDAHIYNKDKKTFKKDEDILADKFFIFETHKNNRPIFPRTVARIEKKDLTLPFKQAWVELCDTDELKNFLGTKQTLPNNFWRNFGSSLFPSIHNEDHQHKKTRKVYSLPLKISEGSYRVRRHTPEGASVWQRMSVGDFGAAGFAKIDGKTQWNKVVEIPHFAKSKNLHSLNRSLEKNPQSITYFDEWRSLCALADALPNGVIKVACAPGTVGRPYIRFEMLESQFIKKINAASGSKYKSSWELPMEIPNVQLAGFDIFSCPLLPKPRTETKKPNKHKARFLRLGKTVLIEYFASSKANKALQQAYEQGEPECI

SEQ ID NO: 91 - protein, 1439 aa, Tamilnaduibacter salinus
MCNLYLKAHSENDYLGESTMTKLVSPIAVDQGARYTGIYSLSYEPGVDPFLESKNAEVVVVDNDKLTLSMAPRRAGRHLRRGNQRFKLARRLLTLVLREAFGVDPDQLDQREREFLFGLLKRRGFTFLGEEIDEEAISGLDPDLVKRLLRNCPPFESLESLWQSLSSDPGMCREFLQLSTGSDDSLDLETLDKRWLKKWLKDNVEEASDKETIERLTSGVLALRDGCRAVIRAKWDGHHPRHIYLENIAQDLKHQPEGNALADRIGLSTGELSHLIGNISNLPLRPLRRYFNDKRFSRNADRWYPERMARQLTREWKGWQPDGVSKDIVQRSRELLKGLSNAAQDPVRFWKYTDPLQTIPPYERHSNRRPPKCQSLLIDVTALGERWPEWERWIAPLHKANPELSEGIDGFSPSISGPNEPRLAFLQRVLDRSTLFDPYGLRQLAVESRSHRAAQGKETLFRDLGDQHARGFLSFVTAYHREREQARSGFWDNQREGRLLKRCHTNPPHKGKILHLLLNRLLDGDIEDVEGFRDEITKTKIGRSTLKGIAQRASDVQKRYGNALNATLKEADLDKATYKRLNDLQALIEKAGPEIGRIAGCPENRRNRLGNVFILAQLFNLLFGDPSGFSSTCRSCSEENAWRSRSVPVPGEDREGWRMIPLTADSVRPFDGVVRRAVDAQARAMARLKKQELKKRDLPAGSFVSIPVLLEQNRFSFSEDLAAIKQRIAPSARHRNRQKAAREAQEQQISRWRGKLDRIRDASHGICPYSGRDLNQVNGQIDHILPRAQSRKLDGTTWNHEANLIYCSTSANVDKGETLKNLEDLDPGYLEAVFPGQSLTSIRQWIADRVKPLLARSGRMPSFVELERDQSIALRHALFDEDLRPQVMELLRGQARATRVNGTQAWLARRFVEELRRSVPELTLSFSVNRIQPEDVGLMRESLSEIRPEFLKAPDQPLSSHAIDAAMVYAAASSLPRMESELHVPAEPLAELHDRLARLLPERIDFTDVSRKPVYSLPRADSQTLFKDTYYAERFLPLLVSSDGALRAGFTPENSVEVKPARKRSESTPAEIAISRLDGFLRLRGARWSGDLSSLFASDASSDQWVALSVDRPLALARLQQVGRGEDELTDTDALLGALKYLTNKKELRTAVVGTGSALMSWEKLNEEIEKKTTLSVSIKGAGLKSDGAKLSLPARSHWLRFAARLNEEGVLGSNPGWSDAEWRRFFQTVFPSAKRDRQHQKVRKVWSLPVVPGSPSGLVRHQRRTRSGQTVFQVASLHEFKHMGVVLRERKAEGVFPGYLRWSTNLAPLAGVLQSPSQRMIRFDQWYPLDRPSVCQSADILSVSAAWGSGLRRSVEVTVSQELACRVFDVNSAWNLPANLKLHNNASELWPIEAIGWPRNNKVELRAITPSGVVLRYQKDKGGKPIQQELERAIREEE

SEQ ID NO: 92 - protein, 1474 aa, Vibrio natriegens
MYAASYPAGTTLKDFSTDMVSKIAFAATSYAPDKGGYVLLQNGRTANRHMSRNRTRNRQAKKLFKTMLECLVGFDVEKHKEAIAHFLNRRGYSYVERQVSLEDLAALTTEQLLPLMRELTKLGHKGIVEEFELTDPIEALRCVASQGAFQLEALIEAFKKLPVKQSKPMLALRDSAKLYLKDQTDGALHRSEYFENLAHDFNKLRKHPERHCRRFFHALNDLKQAKHGYQKDDVLRLLCHVSNFDLKLLNRILRALPESPTETLLNAVLTEHVSKWILKQWVLSESNGQARLQEIRELRRALKQHLTLKPNEIVSFLLNTPPEQTIPPYESHTNRRPPSCQTLILNPKCLDDAYKDWRNWLSELIQASPRKSEIYSYREQLAALISNQEQPLITTEELDARTLQLILDTSKAIDPFKLNCIWSHLKKCHKQARSGQDTSSVIHKLEEALKSSVLPEAFKQVDMAEALQGSFWHLVNRYYQARRKCRDGRYFIPIDKTQKSRHKRWQNDGKLLAMCRHRPKQIKHQALQDVRVLLGLNQQQLPKKVVLNQNGEVDLGAYLLQVKGLKKACDDARKAQKQWGAELNDNLTTDNTLIELTAKIQVLLPALSQHLQLDDSSSAAFIERNQSIYQFAQLYQLTWGDRSGFASTCPVCATDNAVRMADNSAKAQAARLSTLSMHLIDGGLKRHLNHQAHHIANRIWDKLLKPALLKGDKVTMPLILEQNRFDFAENLHMLKGTLKPKGSSAPDQFQPKVERIKQASHVFCPYDKQVTSLGDDGDVDHIIPRSGRYGTLNDEANLIYASRNGNRKIKGNRELTLSDLSDAYLEHQFATTDRAAIQHTIEQRLTGEREEIFRFGRYRQFRALTPENQVAFRHALFLPADHPLRTLVISTLQHRSKSRVNGTQRFMAQLLADIFWQKAKELGKQGNLAFDYFEVSSDPNNEASTVALRRHLESSTLASGFDLQPFAKQTYQPQQAYSHVIDATLAFMLSVQAHPNEGAMRIHLAKGETIWSQVDEDGVYLNTAFEQVVVLPEQLSPVVEVKPRPTHTKVKQLLDGAKPHQVFNRRIFNQNALGLEFYDFQVISGQLFRGWVVVDNGQAEFVKHSGDKSKPADKNLDKIQRLVELGLFRLQRIQGLPIYRANKQALLGYIFDALSQAKVAPQPKQEQSQLVSWLLGKGAGNLYYYTSSKELTKAPSVLKSKGASPFKQHWLNFYTGWEYRAQHPVKQSNGVLEIASDEQANWQAYCETFLKWTPIQETNEVFQPAHAASRAFTMRAPGTPSGVPSLIRKLSAEGSKSYNVMDIDNGVLGKEQAPALALASPNVVLFDRNVLQNGYMADTSPKQVLEATEIPVRAALNTENCNNAGLDLESIKVVIEANKLHIKNIERQWFETNLLLENEVAEKPWQEKLRIFCSGQTKAYGDHAVAEDSFKKLLKRSAKHDKGMALKVEDDKVSVTLVLDKKVTQKILEEITQN

SEQ ID NO: 93 - protein, 1430 aa, Ruminobacter amylophilus
MSNTYYSNIAIDMGGKYTGFISYTSNDLPDSENVKAAIIEMPDDGSVINYTVKNRTAVRHHLRANNRYKKARKLIFTILADTIKRNLTQSEQEAISSLMLRRGYTRLETEIDLEQLKECPVDLFFQCCPGLFTGDVPLYDQFINNCNDDTVYVYRESLSSIKETVSNLSDKTEKSMYGSALKTMVDFVDKFIDQKEFGHKHRTEYLANIRKDIQKDSRLNDLIKLISGEDRLYNCIGNISNLQLRALRWYFNDRGMSGKAVFDKKRFKDVWYRAYKYFHYTAGSNQKDNAEKVDIIKKKNEFLKRIEQTENITDLLLAQDPVFTIPPYEDQNNRRPPVDQTLLLSPQSLDAHYPGKWELWVQKFMDYGSGSYSSLSDELEQIVKLTDRSSRLQSAGGKQSDHIASYTEQKLIHSYYLQRLLDITYNRGNPESQIRKWAQNPNSCSATNAVIKNILGESDIDSFFELANNYYREVSLSKKGLWSIVEHPLLEISGIHPPMKSKMLEELVAGVLNIRKGFNLERFKEVWNSTVKGKSTVRSLCSYIEKTRKKYGNCFKQEYKNVCRYEELKNKASEVHFSSDIKIDKEVVKVYEYTKNLSKFIGEKLELSTDQQSKFANPFSLAQLYTILETDVHGFSGNCKAVCLENTCRMQMSDKGNALCCRLPAESTRPFDGSLGNILDRQAYEIAKIKIAEIKELSALKNTKVKLSVLVEENSFEFSSSLSTIKKSLKAKQLREFALKAEKTEREKWKSKDERLKNDSHNICAYTGMALSDDLSENDHIVSRSETKESYGTIYNSEFNLIRVSRRGNQLKGNNIYTLDNLNPKYLEAVFGTSDTAIITTRIRETLNRLLISNPNLNIDIMTEEERQCCRHALFTSRTGVPFNQIIQAISKQYRARVNGTQAWFVKNLIAKIDEGLREWKSINNITVEYNAYKIDAGSTSEIRHDIGKLDARYEKKDIQPITSHAIDAVCLLGNASTQQEISEEISGNNEISVLSDVKELIKLIPDRFDIIRISSLNFAEKNNPESKQLFKDTIYAEHFLCIMEKDDTVKVGFDFGSNSIQIVKGGKQLLSCLANYLESPKQNETTGFRTYKVCKTAAFKLFERFYRGLVAEGSDEELAYLALMSLRYTTLHQDVFSLLYDVKSKKFAAKKDILKNLDIKISFPSVLKLKTDKASLVLPSFNEWAHIASIFEDYLGKKDEQESGYDKLKQYLGTILNKTINKNHAKSKRVYSLPVVASPSGGVRIKRLTHTHGDIYQLVAANTPVTSISKGFASADNGDVLWDEAVMVDSYTTKNLTVINKKISGDKNFVSMDEQRLVYESPDERVYMTPATDIRRGITIEQKFEKFVYCIDQQNIYKSFHDLPTEIKTDPKIFMERLNIDICGKPRGNLKILSIGNIIKYSYMVESSNRVMNQVYNNPIDKGTIFKSN

SEQ ID NO: 94 - protein, 983 aa, Vibrio sagamiensis
MSTETKPWQDDDKLLAMCRHRPKQIKHQGLQDVRVLLGLNQQQLPKEAVLGLDGKVDLGAYLLQVKGLKQACDDARKAQKQWGTELNDNLTTDNTLIKLTAKIKELLPALCQRLKLDKSSSSAFIERNQSIYHFAQLYQMAWGDRNGFASTCPVCATDNAVRMADNSGQAQAVRLSTLSMRLIDGGLKRHLNHQAHHIANRIWDKLLKPALLKGDKVTIPLILEQNRFDFAENLHVLKGTLRSKGLSAPDQFQPKVERIKQASHNVCPYDKQTTKIGDDGDVDHIIPRSSRYGTLNDEANLIYASRTGNRQIKANRELTLANLSDAYLQSQFNKEFPEGNIDRDEIQRLIEQRLTGKRADIFSFGRYHQFRALSPENQVAFRHALFLPADHPLRALVISTLQHRSKNRVNGTQRFMAQLLADTLWQKAKELGKQGNLAFDYFEVSSDPNNENSTVALRRHLESSTLAVGFDLRPFAKQTTQSQHGYSHVIDATLAFMLSVQAHPNEGAMKIQLAENESIWSRIDDDGTYLNTAFEQVAVLPKELSPLVEVKPRATHTKVKQLLDGAKPHQVVSRRIFKKNALGIEFYDFKDIAGQLFRGWVTIDNGQAKFTKHSGDKSKPADKNLDKIQRLVELGLFRLQRLQGLAIYRANKQAVLGYIFDALSQAKVAPQPNQEQSKLVSWLLGKGAGKLYYYTARKELKKAPSVLKSRGPNPFQEEWLSFYTGWEQRSQLPIKKNKGMLEIASDEQANWQTYCEAFLNRIPIKENDQVFQPAHTALRDFTMRAPGTPSGVPSLIRKISGEGTKRYHIMDINTRVLGEEQAPALAITSANVVLFDRNILQKGYMADITPKQTLEAIEIPIEAALNSKNCQVAELDLKPIKVVIEANKLHINNIERQWFESNLLLKNEAVEKPWWEKSKIFCSGQTNAEGDHSIAQDSFKKLLKRSAKHDKGMTLKVTDETVSVTLTLDKKVTQKIVENMTQD

SEQ ID NO: 95 - protein, 769 aa, Arcobacter porcinus
MGAQRLPADTQRPFSGKIERYIDKLGYEIAKIKAKELEKVAVKNIKIKIILEENSFEYEESIRSAKIKNAKKKANVSLENSKKSYEKSLEDKASRIKNFGNNICAYCSKEIVNNDGEIDHILPRSYTLKNYGTVFNSEGNLLYVHQKCNQDKKDKIYSLDKITAPISKEQIISIVESIKSYKTFTLLSNEQQIAFKYALFLPHNDEAFKKVAEFLRTDQSARVNGTQKYLAKKIQTKLNKMFENKKELDYEFILADSEVVSSLRKQYVKEEPLLAKPKDSKQASSSHTIDAILSLVSVYKKATNLNVEPNASEIVKYANIKSWSALENEFLTKGKSTNQKIENMIETESFTQKNMREVFNKSIFGENALGERFKPIVISNDTIYIGFPIKIKDGYSFENCKQITSKNDKHMVENIIKSELVSKKDKSTIVIYEINKNLFNELSNEYFNLNYKNLADNKKEQVAMLELIIKFSKFYTKRANVISAPSYKKQIEEMKYPFYNEWKLFDEAWKHLMINKNKKGTKDRYVIDKKQENSHYKIDLNKGEYKLDTDNRSLWDDFCKWYFLDRYAKSESNSIRRKARKNFSLIAEGTPQGTMFRLKRKTPKGFVYQALPIDNKQIAGDYSNILLHNNKGSISLLSSNAKKDLTKEFEIKVSKDIRDTKLHPAKFFKDDFNYGKIEVILNKTSATIKNFPLDYFINSFIQKNEEFETNLNSLSFVKNSEEFGVIKSKLDQILKMTTRGDQKINQITINDNFIDFILPYKNTSKLLDE

SEQ ID NO: 96 - protein, 1403 aa, Desulfofustis sp.
MENETYISPIAIDLGAAHTGVYSLIYKAGSTLADVEEKSGVVYELDPQNNTLLMVSRRQKRHQRRNLDRRQMAKRLFRLIWEKHFGLQWDADAAQSIGFLFNRRGFSFITEHYDIQALANFPEEAWQELPRAFTDLIPVDLRNSSGLAEFIMALPRDEPLSNSCLCELYKETNKIKKELVFTQKSIALAKACEAIGQGRGVPVERRKKESPLASVSKWIVERWRDEGVCGLEAVEPTGPVYNIAGFLTEHPSLAETVTATLPDYRAAQNESKQSMWNFAIDKFKLEEAEFERTGETTSEKQDFIRTHLHHLAFAIYTISDELRSGARHRARYFEEVEKVLTGITHRHGYLQRFCGSLQQEHFAGLTPAKLTRLISHISNLELKPLRKYFNDKKHQGGFYWDEERLKRCFSDWVLGQWRVDLAKNRDKGAGKPQDYQKLRTVLQNYEGGIIEFWIGHDPQLSIPPYQDNNNRNPPRCQSLLLNACFLDHAYPSWRRWLEALKDNAADHLGDLETRLLGLESGKKNSYFNQAKSGDQRKDSQKLGMADLDARLFQFILDRRKDSDPLRLADIYGHAKRLRQLGWRTELTEPEKMEQARHQQKLAQTVLESGLPPDLKTSPQFNQQDIFPAGSFLHLVCRYFKNRLRAREGRLFIHPDYQRTAHRGYQFRNRFISENNLLRYCNLKPRQKRYQMVNDVAGVLQVSPDRRVLVARQNHNDGSQSEAVFAWLKDFRGLQTACKNAADSQKEHRGLLKTKLLAGDRALQRLQDRCTQLSRLIAREICSGDEDPEARAQKFSSIFSFAQLYAIAFSDRAGNASTCPVCSLDNSRRMEMVGEDQRAKAQRLPAISTRVIDGAVKRMARILGRKIANDRWPLLKQKLVQGTPVRVPIITESNRFEFEPALSRLKPGVKEKSIGKDTSYEDKRNRIAEQGGGICPYTGQPVGENGEIDHIIPRSSSFGTLNDEANLIFATEQGNKAKGGQFYSLKNLSRTYKQGLFGTNTDEQIAAWIRETLWDERRGRFRFGNYLSFINLGSDEQKAFRHALFLEDGDHVREQVVAAISNRSRAFVNGTQRYFAEVLANEFYKEALDIGKERLISFDYFGVEATSTSRGDGVRDWRRHYEEFYPGEFAPYRKKDGISQHPYSHLLDAQIAFAINADKHRGDGGLRLRIPDHMGLDALNMDTGEILHDNIFHAIRVLPEQMTAVHVQRRRPSDNRCTHRAFTRDLFYADRYLPILLKQEENGVILKAGFTWKNAEVFNKNQRRLLPQLLPLLTQAPHYPARLSQELDKGSTAGTAFEQRLYQLLINTDYFKEQIDRTGAIYLTINRKTLHELWLERHNTKNGTPFENKDHATLFEFCWGKLGYRTEKKHIATEDDLKKLEAKEGNFTPPLTARKSCCRLNMTG

SEQ ID NO: 97 - protein, 1413 aa, Succinatimonas sp.; identical to SEQ ID NO: 63

SEQ ID NO: 98-100 - skipped (3 entries)

SEQ ID NO: 101 - DNA, 141 bp, Artificial Sequence
  source: /note="Description of Artificial Sequence: Synthetic polynucleotide"
  modified_base (1)..(20): a, c, t, g, unknown or other
nnnnnnnnnnnnnnnnnnnngtttcagttattcgttggatagtgtacatatccaacgaatgaagtcacttttaaagtgagctgaaatcactaaaaattaagattgaacccggctactgactctgtcatccgggtttactta

SEQ ID NO: 102 - DNA, 96 bp, Artificial Sequence
  source: /note="Description of Artificial Sequence: Synthetic oligonucleotide"
acatatccaacgaatgaagtcacttttaaagtgagctgaaatcactaaaaattaagattgaacccggctactgactctgtcatccgggtttactta

SEQ ID NO: 103 - DNA, 45 bp, Artificial Sequence
  source: /note="Description of Artificial Sequence: Synthetic oligonucleotide"
  modified_base (1)..(20): a, c, t, g, unknown or other
nnnnnnnnnnnnnnnnnnnngtttcagttattcgttggatagtgt

SEQ ID NO: 104 - DNA, 37 bp, Artificial Sequence
  source: /note="Description of Artificial Sequence: Synthetic oligonucleotide"
gtttcagtggttggatttttagatgagggattattgg

SEQ ID NO: 105 - DNA, 37 bp, Artificial Sequence
  source: /note="Description of Artificial Sequence: Synthetic oligonucleotide"
gttccagttgctaagcgatggtgttgtaaagtgtcgt

SEQ ID NO: 106 - DNA, 37 bp, Artificial Sequence
  source: /note="Description of Artificial Sequence: Synthetic oligonucleotide"
gtttcacaggctaagcggatttgctataaagtgttgc

SEQ ID NO: 107 - DNA, 37 bp, Artificial Sequence
  source: /note="Description of Artificial Sequence: Synthetic oligonucleotide"
gtttcaattgtacaaacttacatccttcaactgaaac

SEQ ID NO: 108 - DNA, 36 bp, Artificial Sequence
  source: /note="Description of Artificial Sequence: Synthetic oligonucleotide"
gtttcagttgttattgaaagaatgtacgattgaagc

SEQ ID NO: 109 - DNA, 37 bp, Artificial Sequence
  source: /note="Description of Artificial Sequence: Synthetic oligonucleotide"
gtttcagtgctatagctcgtagcgttatgatcttcgc

SEQ ID NO: 110 - DNA, 37 bp, Artificial Sequence
  source: /note="Description of Artificial Sequence: Synthetic oligonucleotide"
gtttcagttatatgtagatacagcttataattgatac

SEQ ID NO: 111 - DNA, 37 bp, Artificial Sequence
  source: /note="Description of Artificial Sequence: Synthetic oligonucleotide"
gtttcaaaccgagttgatttgtggtataatttgcaac

SEQ ID NO: 112 - DNA, 37 bp, Artificial Sequence; identical to SEQ ID NO: 111
  source: /note="Description of Artificial Sequence: Synthetic oligonucleotide"

SEQ ID NO: 113 - DNA, 101 bp, Artificial Sequence
  source: /note="Description of Artificial Sequence: Synthetic polynucleotide"
acaaatgcaaattatactacagattaactctttagcgtttgaaatcacctaaaggtgttaacagatcggggcaactgcctttggcacccccggtattattc

SEQ ID NO: 114 - DNA, 37 bp, Artificial Sequence
  source: /note="Description of Artificial Sequence: Synthetic oligonucleotide"
gtttcaaaccaagttggattgtggtataatttgcaac

SEQ ID NO: 115 - DNA, 36 bp, Artificial Sequence
  source: /note="Description of Artificial Sequence: Synthetic oligonucleotide"
gtttcaattaaacactatccaacgaataactgaaac

SEQ ID NO: 116 - DNA, 37 bp, Artificial Sequence
  source: /note="Description of Artificial Sequence: Synthetic oligonucleotide"
gtttcagttgctgaattatttggtaaactactgttag

SEQ ID NO: 117 - DNA, 37 bp, Artificial Sequence
  source: /note="Description of Artificial Sequence: Synthetic oligonucleotide"
gtttcagagcttatcccaacaaaccaacagctgaaac

SEQ ID NO: 118 - DNA, 102 bp, Artificial Sequence
  source: /note="Description of Artificial Sequence: Synthetic polynucleotide"
taggagactttgtaaaatcgaaataaacccccttttcccatttatttagccctcttaaattctctcgggaaagtattatgacaacctatggataggcgacaa

SEQ ID NO: 119 - DNA, 37 bp, Artificial Sequence; identical to SEQ ID NO: 104
  source: /note="Description of Artificial Sequence: Synthetic oligonucleotide"

SEQ ID NO: 120 - DNA, 37 bp, Artificial Sequence
  source: /note="Description of Artificial Sequence: Synthetic oligonucleotide"
gtttcagtggctgacttgttgagataggctctgaagc

SEQ ID NO: 121 - DNA, 37 bp, Artificial Sequence
  source: /note="Description of Artificial Sequence: Synthetic oligonucleotide"
gtttcagttgatcgaatctcaagactgaacatgatgg

SEQ ID NO: 122 - DNA, 37 bp, Artificial Sequence
  source: /note="Description of Artificial Sequence: Synthetic oligonucleotide"
gtttcattactacgtaagtttgataagctagtgatac

SEQ ID NO: 123 - DNA, 37 bp, Artificial Sequence
  source: /note="Description of Artificial Sequence: Synthetic oligonucleotide"
ctttcagttgctacccagacgaagtaagctttgattc

SEQ ID NO: 124 - DNA, 37 bp, Artificial Sequence
  source: /note="Description of Artificial Sequence: Synthetic oligonucleotide"
gtttcagaggtcagtcatttgggatagcctttgaagc

SEQ ID NO: 125 - DNA, 37 bp, Artificial Sequence
  source: /note="Description of Artificial Sequence: Synthetic oligonucleotide"
gtttcagtggctgacttgttgagataagctgtggaac

SEQ ID NO: 126 - DNA, 37 bp, Artificial Sequence
  source: /note="Description of Artificial Sequence: Synthetic oligonucleotide"
ccaataatccctcatctaaaaatccaaccactgaaac

SEQ ID NO: 127 - DNA, 37 bp, Artificial Sequence
  source: /note="Description of Artificial Sequence: Synthetic oligonucleotide"
acgacactttacaacaccatcgcttagcaactggaac

SEQ ID NO: 128 - DNA, 37 bp, Artificial Sequence
  source: /note="Description of Artificial Sequence: Synthetic oligonucleotide"
gcaacactttatagcaaatccgcttagcctgtgaaac

SEQ ID NO: 129 - DNA, 37 bp, Artificial Sequence
  source: /note="Description of Artificial Sequence: Synthetic oligonucleotide"
gtttcagttgaaggatgtaagtttgtacaattgaaac

SEQ ID NO: 130 - DNA, 36 bp, Artificial Sequence
  source: /note="Description of Artificial Sequence: Synthetic oligonucleotide"
gcttcaatcgtacattctttcaataacaactgaaac

SEQ ID NO: 131 - DNA, 37 bp, Artificial Sequence
  source: /note="Description of Artificial Sequence: Synthetic oligonucleotide"
gcgaagatcataacgctacgagctatagcactgaaac

SEQ ID NO: 132 - DNA, 37 bp, Artificial Sequence
  source: /note="Description of Artificial Sequence: Synthetic oligonucleotide"
gtatcaattataagctgtatctacatataactgaaac

SEQ ID NO: 133 - DNA, 37 bp, Artificial Sequence
  source: /note="Description of Artificial Sequence: Synthetic oligonucleotide"
gttgcaaattataccacaaatcaactcggtttgaaac

SEQ ID NO: 134 - DNA, 37 bp, Artificial Sequence; identical to SEQ ID NO: 133
  source: /note="Description of Artificial Sequence: Synthetic oligonucleotide"

SEQ ID NO: 135 - DNA, 37 bp, Artificial Sequence
  source: /note="Description of Artificial Sequence: Synthetic oligonucleotide"
gttgcaaattataccacaatccaacttggtttgaaac

SEQ ID NO: 136 - DNA, 37 bp, Artificial Sequence; identical to SEQ ID NO: 135
  source: /note="Description of Artificial Sequence: Synthetic oligonucleotide"

SEQ ID NO: 137 - DNA, 36 bp, Artificial Sequence
  source: /note="Description of Artificial Sequence: Synthetic oligonucleotide"
gtttcagttattcgttggatagtgtttaattgaaac

SEQ ID NO: 138 - DNA, 37 bp, Artificial Sequence
  source: /note="Description of Artificial Sequence: Synthetic oligonucleotide"
ctaacagtagtttaccaaataattcagcaactgaaac

SEQ ID NO: 139 - DNA, 37 bp, Artificial Sequence
  source: /note="Description of Artificial Sequence: Synthetic oligonucleotide"
gtttcagctgttggtttgttgggataagctctgaaac

SEQ ID NO: 140 - DNA, 37 bp, Artificial Sequence; identical to SEQ ID NO: 129
  source: /note="Description of Artificial Sequence: Synthetic oligonucleotide"

SEQ ID NO: 141 - DNA, 38 bp, Artificial Sequence
  source: /note="Description of Artificial Sequence: Synthetic oligonucleotide"
ccaataatccctcatctaaaaatccaaccactgaaact

SEQ ID NO: 142 - DNA, 37 bp, Artificial Sequence
  source: /note="Description of Artificial Sequence: Synthetic oligonucleotide"
gcttcagagcctatctcaacaagtcagccactgaaac

SEQ ID NO: 143 - DNA, 37 bp, Artificial Sequence
  source: /note="Description of Artificial Sequence: Synthetic oligonucleotide"
ccatcatgttcagtcttgagattcgatcaactgaaac

SEQ ID NO: 144 - DNA, 37 bp, Artificial Sequence
  source: /note="Description of Artificial Sequence: Synthetic oligonucleotide"
gtatcactagcttatcaaacttacgtagtaatgaaac

SEQ ID NO: 145 - DNA, 37 bp, Artificial Sequence
  source: /note="Description of Artificial Sequence: Synthetic oligonucleotide"
gaatcaaagcttacttcgtctgggtagcaactgaaag

SEQ ID NO: 146 - DNA, 37 bp, Artificial Sequence
  source: /note="Description of Artificial Sequence: Synthetic oligonucleotide"
gcttcaaaggctatcccaaatgactgacctctgaaac

SEQ ID NO: 147 - DNA, 37 bp, Artificial Sequence
  source: /note="Description of Artificial Sequence: Synthetic oligonucleotide"
gttccacagcttatctcaacaagtcagccactgaaac

SEQ ID NO: 148 - DNA, 95 bp, Artificial Sequence
  source: /note="Description of Artificial Sequence: Synthetic oligonucleotide"
atcatctaaatttcgataccctgaaatcaacaaaattaaagattgaatcgtttttctatgctcgtcttaatagcgagcatataacgatttcaaaa

SEQ ID NO: 149 - DNA, 102 bp, Artificial Sequence
  source: /note="Description of Artificial Sequence: Synthetic polynucleotide"
tcacgacactttacaacacgtatcgttcgatgcactgaaatcatcgaaaagatatatagacccgcccaactgccttaggcatggcgggcttctttcttaaaa

SEQ ID NO: 150 - DNA, 93 bp, Artificial Sequence
  source: /note="Description of Artificial Sequence: Synthetic oligonucleotide"
gcaacactttatagcaaatccgttcgatgccttgaaatcatcaaaaagatataatagacccgcccactgtattgtacatggcgggacttttta

SEQ ID NO: 151 - DNA, 100 bp, Artificial Sequence
  source: /note="Description of Artificial Sequence: Synthetic polynucleotide"
ataggagactttgtaaaatcgaaataaacccccttttcccatttatttagccctcttaaattctctcgggaaagtattatgacaacctatggataggcga

SEQ ID NO: 152 - DNA, 127 bp, Artificial Sequence
  source: /note="Description of Artificial Sequence: Synthetic polynucleotide"
tagttacattctttcaacaacgaaatcgccttagggcgagctgaaatcaatttgattaaatattagatccggctactgaggcctcttggccttatccggattaacaaggagcctctattcgaggctt

SEQ ID NO: 153 - DNA, 104 bp, Artificial Sequence
  source: /note="Description of Artificial Sequence: Synthetic polynucleotide"
acatcgtaggataccgattagagatcataacgctatgagctataggaaatcaccttcgggtgagctgaaatcccctaaagctaagattgaatccggccactatc

SEQ ID NO: 154 - DNA, 105 bp, Artificial Sequence
  source: /note="Description of Artificial Sequence: Synthetic polynucleotide"
aaagtatctacatatgaagtcgtctttatggcgagctgaaatcaccaaaagttaagatatagaccaagcaactgtaatttacatcttggtatcttcagtatctgt

SEQ ID NO: 155 - DNA, 100 bp, Artificial Sequence
  source: /note="Description of Artificial Sequence: Synthetic polynucleotide"
atacaaacgcaaattatactacagattaactctttagcgtttgaaatcacctaaaggtgttaacagatcggggcaactgccatatggcacccccggtatc

SEQ ID NO: 156 - DNA, 100 bp, Artificial Sequence; identical to SEQ ID NO: 155
  source: /note="Description of Artificial Sequence: Synthetic polynucleotide"

SEQ ID NO: 157 - DNA, 88 bp, Artificial Sequence
  source: /note="Description of Artificial Sequence: Synthetic oligonucleotide"
caaattataccataatctagcttatagcgtttgaaatcaccacaaggtgttttcatatcggggcaactgcctttggcacccccggtta

SEQ ID NO: 158 - DNA, 90 bp, Artificial Sequence
  source: /note="Description of Artificial Sequence: Synthetic oligonucleotide"
caaattataccataatctagcttatagcgtttgaaatcaccacaaggtgttttcatatcggggcaactgcctttggcacccccggttatt

SEQ ID NO: 159 - DNA, 97 bp, Artificial Sequence
  source: /note="Description of Artificial Sequence: Synthetic oligonucleotide"
tatccaacgaatgaagtcacttttaaagtgagctgaaatcactaaaaattaagattgaacccggctactgactctgtcatccgggtttacttatttc

SEQ ID NO: 160 - DNA, 80 bp, Artificial Sequence
  source: /note="Description of Artificial Sequence: Synthetic oligonucleotide"
gtaccaaataattaatgctctgtaatcatttaaaagtattttgaacggacctctgtttgacacgtctgaataactaaaaa

SEQ ID NO: 161 - DNA, 101 bp, Artificial Sequence
  source: /note="Description of Artificial Sequence: Synthetic polynucleotide"
ttcagaatgcatcccaacattctatacactgaaatcatagaaaatcacgtttgtggcccgaccaactgcttcggcatgtcgggttttttcatttctaaacc

SEQ ID NO: 162 - DNA, 98 bp, Artificial Sequence
  source: /note="Description of Artificial Sequence: Synthetic oligonucleotide"
atttcagtgtatagaatgttgggatgcattctgaatacgaagctatcacccagttcgaagaattgcaagaaagtgccgtcacctaaccaattcgaata

SEQ ID NO: 163 - DNA, 102 bp, Artificial Sequence; identical to SEQ ID NO: 118
  source: /note="Description of Artificial Sequence: Synthetic polynucleotide"

SEQ ID NO: 164 - DNA, 133 bp, Artificial Sequence
  source: /note="Description of Artificial Sequence: Synthetic polynucleotide"
ggcaataattaaattagaaatcatctaaatttcgataccctgaaatcaacaaaattaaagattgaatcgtttttctatgctcgtcttaatagcgagcatataacgatttcaaaatctatcgttacagtgattt

SEQ ID NO: 165 - DNA, 100 bp, Artificial Sequence
  source: /note="Description of Artificial Sequence: Synthetic polynucleotide"
tcagcgcctatttttttcgcaaaccgctttgatgtcagaaaatggcggtattttgcgaacatgctccttagacaaaaataatcttcatctgtcattgcag

SEQ ID NO: 166 - DNA, 100 bp, Artificial Sequence
  source: /note="Description of Artificial Sequence: Synthetic polynucleotide"
gatagacattttgcgaaaacaagtcatagtgtaattgagattcgtacaactgaaatcaatcaaatgtaagattggctgaccctctacagtgcgtatggtc

SEQ ID NO: 167 - DNA, 86 bp, Artificial Sequence
  source: /note="Description of Artificial Sequence: Synthetic oligonucleotide"
aagagtatattggaaatatcaaacttactatgtaatgaaatcaattaaaatcaagattgattgtccctctgcgctagcatgggcaa

SEQ ID NO: 168 - DNA, 81 bp, Artificial Sequence
  source: /note="Description of Artificial Sequence: Synthetic oligonucleotide"
tacttcgtttggtatgcactgaaatcaccaaaagtcgcgataagcgaaccagctctccagactatctggagccctctggaa

SEQ ID NO: 169 - DNA, 120 bp, Artificial Sequence
  source: /note="Description of Artificial Sequence: Synthetic polynucleotide"
tggactagggtaagaaatatcccaaatgacataccctgaaatcaccaaaaggtagaatgaagattctgacacccgcactgcattgcgcaccgggtgtttttcatttcagaatcggtcgtt

SEQ ID NO: 170 - DNA, 101 bp, Artificial Sequence
  source: /note="Description of Artificial Sequence: Synthetic polynucleotide"
ttatgtggggttttacgcttacttttttcgcaaatgcatcggatgtcatcaaatcccctttttttgcgaacatttcttcctatcgcacctttagcgatcat

SEQ ID NO: 171 - DNA, 101 bp, Artificial Sequence
  source: /note="Description of Artificial Sequence: Synthetic polynucleotide"
caaatgcatcggatgtcatcaaatcccctttttttgcgaacatttcttcctatcgcacctttagcgatcattgcaataccttagatactcacattgatcgc

SEQ ID NO: 172 - DNA, 116 bp, Artificial Sequence
  source: /note="Description of Artificial Sequence: Synthetic polynucleotide"
gtttcagttgctgaattatttggtaaacagtaccaaataattaatgctctgtaatcatttaaaagtattttgaacggacctctgtttgacacgtctgaataactaaaaattttttt

SEQ ID NO: 173 - DNA, 126 bp, Artificial Sequence
  source: /note="Description of Artificial Sequence: Synthetic polynucleotide"
gtttcaaaccaagttggattgtggtataatttgcaacccaaattataccataatctagcttatagcgtttgaaatcaccacaaggtgttttcatatcggggcaactgcctttggcacccccggtta

SEQ ID NO: 174 - DNA, 133 bp, Artificial Sequence
  source: /note="Description of Artificial Sequence: Synthetic polynucleotide"
gtttcagtggttggatttttagatgagggattattggaatcatctaaatttcgataccctgaaatcaacaaaattaaagattgaatcgtttttctatgctcgtcttaatagcgagcatataacgatttcaaaa

SEQ ID NO: 175 - DNA, 171 bp, Artificial Sequence
  source: /note="Description of Artificial Sequence: Synthetic polynucleotide"
gtttcagtggttggatttttagatgagggattattgggggcaataattaaattagaaatcatctaaatttcgataccctgaaatcaacaaaattaaagattgaatcgtttttctatgctcgtcttaatagcgagcatataacgatttcaaaatctatcgttacagtgattt

SEQ ID NO: 176 - DNA, 139 bp, Artificial Sequence
  source: /note="Description of Artificial Sequence: Synthetic polynucleotide"
gtttcaattgtacaaacttacatccttcaactgaaactaggagactttgtaaaatcgaaataaacccccttttcccatttatttagccctcttaaattctctcgggaaagtattatgacaacctatggataggcgacaa

SEQ ID NO: 177 - DNA, 123 bp, Artificial Sequence
  source: /note="Description of Artificial Sequence: Synthetic polynucleotide"
gtttcaattgtacaaacttacatccttcaactgaaaccataggagactttgtaaaatcgaaataaacccccttttcccatttatttagccctcttaaattctctcgggaaagtattatgacaa

SEQ ID NO: 178 - DNA, 137 bp, Artificial Sequence
  source: /note="Description of Artificial Sequence: Synthetic polynucleotide"
gtttcagtagttgttagaagaatgtagtattgaagcatttaattacattcttttaacaacgaagtcgccttcgggcgagctgaaatcaatttgattaaatattagatccggctactgaggtctttgaccttatccgg

SEQ ID NO: 179 - DNA, 141 bp, Artificial Sequence
  source: /note="Description of Artificial Sequence: Synthetic polynucleotide"
gtttcagttatatgtagatacagcttataattgataccaaagtatctacatatgaagtcgtctttatggcgagctgaaatcaccaaaagttaagatatagaccaagcaactgtaatttacatcttggtatcttcagtatct

SEQ ID NO: 180 - DNA, 137 bp, Artificial Sequence
  source: /note="Description of Artificial Sequence: Synthetic polynucleotide"
gtttcagtgctatagctcgtagcgttatgatcttcgccacatcgtaggataccgattagagatcataacgctatgagctataggaaatcaccttcgggtgagctgaaatcccctaaagctaagattgaatccggcca

SEQ ID NO: 181 - DNA, 121 bp, Artificial Sequence
  source: /note="Description of Artificial Sequence: Synthetic polynucleotide"
gtttcagctgttggtttgttgggataagctctgaaacattcagaatgcatcccaacattctatacactgaaatcatagaaaatcacgtttgtggcccgaccaactgcttcggcatgtcggg

SEQ ID NO: 182 - DNA, 133 bp, Artificial Sequence
  source: /note="Description of Artificial Sequence: Synthetic polynucleotide"
gtttcagttgatcgaatctcaagactgaacatgatggaagtcatagtgtaattgagattcgtacaactgaaatcaatcaaatgtaagattggctgaccctctacagtgcgtatggtcagtaagttagtgttct

SEQ ID NO: 183 - DNA, 113 bp, Artificial Sequence
  source: /note="Description of Artificial Sequence: Synthetic polynucleotide"
cgacactttacaacacgtatcgttcgatgcactggaatcatcgaaaagatatatagacccgcccaactgccttaggcatggcgggcttctttcttaaaacctatcattacaat

SEQ ID NO: 184 - DNA, 148 bp, Artificial Sequence
  source: /note="Description of Artificial Sequence: Synthetic polynucleotide"
gtttcacaggctaagcggatttgctataaagtgttgcggcaacactttatagcaaatccgttcgatgccttgaaatcatcaaaaagatataatagacccgcccactgtattgtacatggcgggactttttaaaacctgtcattgcagt

SEQ ID NO: 185 - DNA, 124 bp, Artificial Sequence
  source: /note="Description of Artificial Sequence: Synthetic polynucleotide"
gtttcattactacgtaagtttgataagctagtgataccaagagtatattggaaatatcaaacttactatgtaatgaaatcaattaaaatcaagattgattgtccctctgcgctagcatgggcaa

SEQ ID NO: 186 - DNA, 138 bp, Artificial Sequence
  source: /note="Description of Artificial Sequence: Synthetic polynucleotide"
gtttcagtggctgacttgttgagataggctctgaagcgtcagcgcctatttttttcgcaaaccgctttgatgtcagaaaatggcggtattttgcgaacatgctccttagacaaaaataatcttcatctgtcattgcag

SEQ ID NO: 187 - DNA, 109 bp, Artificial Sequence
  source: /note="Description of Artificial Sequence: Synthetic polynucleotide"
ctttcagttgctacccagacgaagtaagtacttcgtttggtatgcactgaaatcaccaaaagtcgcgataagcgaaccagctctccagactatctggagccctctggaa

SEQ ID NO: 188 - DNA, 158 bp, Artificial Sequence
  source: /note="Description of Artificial Sequence: Synthetic polynucleotide"
gtttcagaggtcagtcatttgggatagcctttgaagcatggactagggtaagaaatatcccaaatgacataccctgaaatcaccaaaaggtagaatgaagattctgacacccgcactgcattgcgcaccgggtgtttttcatttcagaatcggtcgtt

SEQ ID NO: 189 - DNA, 138 bp, Artificial Sequence
  source: /note="Description of Artificial Sequence: Synthetic polynucleotide"
gtttcagtggctgacttgttgagataagctgtggaaccaaatgcatcggatgtcatcaaatcccctttttttgcgaacatttcttcctatcgcacctttagcgatcattgcaataccttagatactcacattgatcgc

SEQ ID NO: 190 - DNA, 135 bp, Artificial Sequence
  source: /note="Description of Artificial Sequence: Synthetic polynucleotide"
gttccacagcttatctcaacaagtcagccactgaaacttatgtggggttttacgcttacttttttcgcaaatgcatcggatgtcatcaaatcccctttttttgcgaacatttcttcctatcgcacctttagcgat

SEQ ID NO: 191 - DNA, 134 bp, Artificial Sequence
  source: /note="Description of Artificial Sequence: Synthetic polynucleotide"
gtttcagttattcgttggatagtgtttaattgaaacctatccaacgaatgaagtcacttttaaagtgagctgaaatcactaaaaattaagattgaacccggctactgactctgtcatccgggtttacttatttc

SEQ ID NO: 192 - protein, 1361 aa, Arcobacter skirrowii
MNTTSIISLDLGGKNTGFFSCTTNDFNNLKNFQSGTIIYDESFILSQVNRRGKRHTKRNNLRKKLVKRLFLLILKEHYKLKIKYLPDEILALFNKRGYTYASFELSNEEQESLSSNILKEFLNENLENFNISNDIEIEDFLNQIASNENAFKQYSKDFLNLYESSTFKPKNKIELKDEIKNSYEDKEEQKELFDGLKTVKKILEEFDKQQNQGNLPRAKYFLEIKEEIKTNSNIQNFLKNSNLEEEKINNLIGNISNFQLKELRRYFNDKEMVQGDIWIENKLHKIVWRFITSWHPKKDETIKKNQDELTSNLKNSKIIEFLTQTNPNKTIPPYDDMNNRGAVKCQSLRLNKNYLDTHLPNWRKIANTLANDSLKENLKNCTTNKSDIDLTLLHRLLDTSSSIDSYKLREYNIENYIDILGKDDSLKFKKFTQNYYETITKKVRTGIWQKADNIFELCNHNPPYKNNQIHTLVSAILGVEISDTKFKEFEETLWNKKFGNKKLVNYCKNIEEIRKRKGNLFKLYIEELKEIEKPDSEQKKDINLLKDELLLFWTDEIANFFKLDNIFKSRFSNHFSMAQLYTIIETKRAGFMSTCKWCSAENSFRTKTNIENFTLYDKFTGEKLEDVIFDENIHIKVYENSNAQRLPADTQRPFSGKIERYIDKLGYEIAKIKAKELENTEEKKIDLKIVLEQNSFEYEESIRSAKIKNANAKAKKSLEDSKKFFEKSIEEKEKRIKNFNNKICLYCNSEITTDGEIDHILPRSYTLKNYGTVFNSEGNLLYVHQKCNQSKGNKIYKLEDIKASMNVNEIEEQISKIKSYKTFTLLNQKQQEAFKFALFLPNSSEAYKKVLGFLRTDQSSRVNGTQKYLAKKIQEKLIKMFPQKEFDFEFILASSEDVSRLRKDYAKQNSILENQKIINNLHLVTQAVVALSSVFKKVTNLDDIPTSNKILEFIQINNIPIKPLGKIEKEQIGNLGNGSIFKDSIYQENFAPIYEFENRFYTGFLKASKTPDFKNCIEIKSSDFEQIKEYLKDEIKKENGLIIYQINKQKTLDLFHNISNNLSDELKLAQTLDKFSYTLLKTSVENAPKILKDSKKTSTKIYGKTLILPIKDEWERFDKFLKKELISQNIEYKEKDGKYQIENEILISICKDYFNIQNKNIRNKARKVFSLPTVEAPSGGFRIRRKNHKNENIYQLVGIDGAKSVGFALENKKINSSKDVLLPTLVKSKNISFKEPAKKELQEYIDMNNFRDLTKFVNLENINIFVAPASTNRPLVKVELDFNLLKNILKNENLNFLELDNIKLEDEQKAIFDEIFNSCNFAPRDNKIKILKADSNRVLIEFSNSNKTIMKYYDKAEDINI

SEQ ID NO: 193 - protein, 1645 aa, Francisella philomiragia
MSIKILPIAIDLGAKNTGVFSAFYDKGLKLESLITKHGMVYELSKDSYTLLMTSRTAKRHQRRGLDRKQLVKRLFKLIWTEKLKLDWDKDTQQTVSFLLNRRGFSFLEEKHDASYFEKFPIEAIELLPQQLRLGIDSEENYDLNSKILETLENDTFKDVFEEIESNIKQAKKNIVKANVINIIKSAIDDKVRMGEIKPTKQNKFNDLKKVSLWIVEDIFDSTTSAYIERVDNYSKNIFNYLNSLSSDQLEILKTNLPIIDLNEHKNSVWNFNISNFNLDNEKLVEKLEVGDVSAHLHHLGYALQNIKKELDEGSRHRSKYFEEVASVLLEQNHKEGYLRNFCQNLHIGKYKNLNVKKLVNLIGNLSNLELKPLRKYFNDKAHAKADYWDEKRFAETYCRWILGEWRVGVKDKDKKDDAKYSYKDLCNELKLEVGTTQEVKANKSKGSVVEFLLELDPCRTIPPYQDNNNRKPPKCQSLILNPKYLDKKYPEWQDYLKQLKQLDSVQKYLEEFEQDLKGLKTSKDQPYFVGTKSENKQIASGQRDQKDLDARVLQFIFDRVKANDDLLLNEIYSQAKKAKQNASNESEIARAVQNLDKTLAKSKLPSALKTQHIKGIFEQGTLLHLVCKYFKARQRARDSRLYIMPEYRYDKNLDKYNNTGRFDDDNQLLTYCNHKPRQKRYQLLNDLAGVLQVSNGQLLSVEKWFRQAQPAETTKSQDEQIFEWLKAFKIASYCKAAVDVQKQYRGTLKNAVQTAIFKQRLETIKKNKKASQDEKALLEKYKNAKPLTADEKNLVKLVDNISKASQKIGENLGLDNKQVSKFNSIYSFAQIQQIAFAERNGNANTCAVCSADNAHRMQISNDSAKAQRLPAIPTRIVDGAVKKMATILARNIVDDNWDNIKKTLENKEELHIPIITESNAFEFEPNLAEIKGTKKKDRISSQELFAKKEERIKKASNEISAYSGASLGGETELDHIIPRSHKKYGTLNDEANLICVTRDDNQKRGNTPYYLSNLADKYKLKLFGTADNQEIEKYIADKIWDSERQDFKFGNYRSFINLSQEEQIAFRHALFLADENPIKQAVIKAIDNRNRAFVNGTQRYFAEVLANNIYLRAKKENLATNKLSFDYFGVETTNSNGRGIADIRKLYEAIDSDIEAYAKGDKPQDSYSHLIDAMIAFCVAADEHKNDGSIGLEIDETYSLYPLDENTGEVFKEDIFSQIKVADSEFRETKLARRKAYTVETNIRQEIQSKGDFKKSIPYKIHIDSLSAERFFPLLQISQDKWKYGFTLDNSVDIPKKDIELIQEFLTKSKEYKDYTVWIVNKTQAQEFLINIGYVGADKQQEKIAKLLDKLSYTTIKKEITSILAKANKTPDTVGDALDVIDELVFKTDKKNKLINFVKSEILLPVYNDWIMLKKAMQKADMNQNLHDFLSMYFITTNLKNKHQKVRKNFSLPVVSTIGTIRIRRKSWDGSNIYQVTGDESLAKYGFDGTVRPKTILSRNSVPIKYYNGKEKEVLIEPLSWIILDIDDLTDTSIIRAQIKNRSAGQVSIKVELSSLDNICLKEDSWSGNIIYAGDKDKPNTIKGDKFYIKKEDFYWLKDFSLMFDSGKTKASLSIDKIGNSYILEFVSSKGKKEKQWLKNETPNS

SEQ ID NO: 194 - protein, 1639 aa, Francisella hispaniensis
MNIKILPIAIDLGAKNTGVFSAFYQKGTSLESLDNKNGKVYELSKDSYTLLMNNRTARRHQRRGIDRKQLVKRLFKLIWTKQLNLEWNKDTQQTISFLLNRRGFSFITDGYSPEYLNIAPEPVKVILMSILDDYNGEDDLDSYLQSATENDSKIDELYNKLLQKTLEFKLRKLCIDIKEDKVTTKTLKELSNTEFKLLANYLVDYDRILRTQKFSYTDKQGNLRELNYYHHDKYNIQEFLKRNIIINDVILEKLTDDLDIWNLNFDKFDFEKNLEKLENQEDKDYLQTHLHHFVFAVNKIKSEMASGGRHRSQYFQEITNVLVENNHQEGYLKNFCENLHNKKYSNLSVKNLVNLIGNLSNLELKPLRKYFNDKIHAKADYWDEQKFAETYSDWILGEWRVGAKDKDKKDGAKYSYKILCDELKQKVGINQDGIINQTKGDFVGFLLELDPCRTIPPYLDNNNRKPPKCQSLILNPKFLDNKYPNWQQYLQELKKLQTVQNYLGNFEIDLKDLKSSKEQPYFVKYKSSNQQIASGQRDYKDLDARVLQFIFDRVKASDELLLNEIYSHAKKLKQNISSELEKLELCKKLDKIIANSQLSQILKSQHINGIFEQGTFLHLVCKYYKQRQRARDSRLYIMPEYRYDKKLDKYNNTGRFDDDNQLLTYCNHKPRQKRYQLLNDLAGVLQVSPNFLKDKIGSDDDLFISKWLVEHIRGFKKACEDSLKIQKDNRGLLNHKINIARNTKGKCEKEIFNLICKIEGSEDKKGNYKHGLAYELGVLLFGEPNQASKLEFDRKIKKFNSIYSFAQIQQIAFAERKGNANTCAVCSADNAHRMQQIKVAKPVEGNKDNIILSAKAQRLPAIPTRIVDGAVKKMATILARNIVDDNWDNIKQALSNNQQLHVPIITESNAFEFEPALADVKGKSLKDKRKKALERINPENTFKDKNNRIKEFAKGISAYSGDNLANGDFDGAKEELDHIIPRAHKKYGTLNDEANLICVTREDNQNRGNKAVFLYDLKPNYKLKQFDTTDDLEIEKKIADTIWDASKQDFKFGNYRSFINLTPQEQKAFRHALFLADENPIKKAVIRAINNRNRTFVNGTQRYFAEVLANNIYLRAKKENLATNRITFDYFGIETTNSNGRGVADVRKLYEKVDSDIQAYAKGDKPQDSYSHLIDAMIAFCVAADEHKNGGSIGLEIDKNYSLYPLDKNTGEVFSKDIFSQIKIADNEFSDKKLVRKKATEGFNTHRQMTRDGIYGESYLPILIHKNLNEVRKGYNWENSEEIKIFKGKKYDIQQLNNLVYCLKFVDKPISIDIQITTLEELRNILETNNISTTAEYYYINLKTQKLHEYYIENYNTALGYKKYTKEMEFLRSLAYRTERVKIKSIDDVSMILAKDSNFKAGKIELPFKTEWQRLYLEWQNTTIKDNYEFLKSYFSVKNATKQHKKVRKDFSLPISTNEGKLLVKRKTWDNNFIYQILNDSDSRADGTKPFIPAFDISKNEIVETIIKSFTSKNIFWLPKNIKLQKVDNKSIFAIDTSRWFEVETPKDLIEIGVSTIQYKIDNNSRPKVRVKLDYVMDDDSKINYFMNHSLLKSRYPDKVLEILKQSTIIEFESSGFNKTIKEMLGMTLAGIYNETLNN

SEQ ID NO: 195 - protein, 1422 aa, Parendozoicomonas haliclonae; identical to SEQ ID NO: 90

SEQ ID NO: 196 - DNA, 37 bp, Artificial Sequence
  source: /note="Description of Artificial Sequence: Synthetic oligonucleotide"
gcgacactttacaacaatatcgcttagctaatgaaac

SEQ ID NO: 197 - DNA, 37 bp, Artificial Sequence
  source: /note="Description of Artificial Sequence: Synthetic oligonucleotide"
ccaacagtagtataccaaatattctagctactgaaac

SEQ ID NO: 198 - DNA, 37 bp, Artificial Sequence
  source: /note="Description of Artificial Sequence: Synthetic oligonucleotide"
ctaacagcagtatatcaaataatctagctactgaaac

SEQ ID NO: 199 - DNA, 37 bp, Artificial Sequence; identical to SEQ ID NO: 145
  source: /note="Description of Artificial Sequence: Synthetic oligonucleotide"

SEQ ID NO: 200 - DNA, 37 bp, Artificial Sequence
  source: /note="Description of Artificial Sequence: Synthetic oligonucleotide"
gtttcattagctaagcgatattgttgtaaagtgtcgc

SEQ ID NO: 201 - DNA, 37 bp, Artificial Sequence
  source: /note="Description of Artificial Sequence: Synthetic oligonucleotide"
gtttcagtagctagaatatttggtatactactgttgg

SEQ ID NO: 202 - DNA, 36 bp, Artificial Sequence
  source: /note="Description of Artificial Sequence: Synthetic oligonucleotide"
tttcagtagctagattatttgatatactgctgttag

SEQ ID NO: 203 - DNA, 37 bp, Artificial Sequence; identical to SEQ ID NO: 123
  source: /note="Description of Artificial Sequence: Synthetic oligonucleotide"

SEQ ID NO: 204 - DNA, 46 bp, Artificial Sequence
  source: /note="Description of Artificial Sequence: Synthetic oligonucleotide"
ccttgaagtcgatgcccttcctagacacatcccttatgcacaattt

SEQ ID NO: 205 - DNA, 46 bp, Artificial Sequence
  source: /note="Description of Artificial Sequence: Synthetic oligonucleotide"
ccatgaagtcgatgcccttcctagacacatcccttatgcacaattt

SEQ ID NO: 206 - DNA, 68 bp, Artificial Sequence
  source: /note="Description of Artificial Sequence: Synthetic oligonucleotide"
tcccctccaccccacagtggggccactagggacaggattggtgacagaaaagccccatccttaggcct

SEQ ID NO: 207 - DNA, 45 bp, Artificial Sequence
  source: /note="Description of Artificial Sequence: Synthetic oligonucleotide"
tcccctccacaggattggtgacagaaaagccccatccttaggcct

SEQ ID NO: 208 - DNA, 45 bp, Artificial Sequence
  source: /note="Description of Artificial Sequence: Synthetic oligonucleotide"
aggcctaagcctgtccctagtggccccactgtggggtggagggga

SEQ ID NO: 209 - DNA, 68 bp, Artificial Sequence
  source: /note="Description of Artificial Sequence: Synthetic oligonucleotide"
accccgatgcaggattggtgacagaaaagcccccccacagtggggccactagggacaggtaagggatc

SEQ ID NO: 210 - DNA, 45 bp, Artificial Sequence
  source: /note="Description of Artificial Sequence: Synthetic oligonucleotide"
accccgatgccccacagtggggccactagggacaggtaagggatc

SEQ ID NO: 211 - DNA, 45 bp, Artificial Sequence
  source: /note="Description of Artificial Sequence: Synthetic oligonucleotide"
gatcccttagggggggcttttctgtcaccaatcctgcatcggggt

SEQ ID NO: 212 - DNA, 45 bp, Artificial Sequence
  source: /note="Description of Artificial Sequence: Synthetic oligonucleotide"
tcccctccaccccacagtggggccactagggacaggtaagggatc

SEQ ID NO: 213 - DNA, 41 bp, Artificial Sequence
  source: /note="Description of Artificial Sequence: Synthetic oligonucleotide"
tcccctccaccccacagtggggccactagggacttaggcct

SEQ ID NO: 214 - DNA, 41 bp, Artificial Sequence
  source: /note="Description of Artificial Sequence: Synthetic oligonucleotide"
aggcctaaggatggggcttttctgtcaccaattggagggga

SEQ ID NO: 215 - DNA, 68 bp, Artificial Sequence
  source: /note="Description of Artificial Sequence: Synthetic oligonucleotide"
accccatccattggtgacagaaaagccccatcaggtccccacagtggggccactagggagtcaggatc

SEQ ID NO: 216 - DNA, 41 bp, Artificial Sequence
  source: /note="Description of Artificial Sequence: Synthetic oligonucleotide"
accccatccattggtgacagaaaagccccatcgtcaggatc

SEQ ID NO: 217 - DNA, 41 bp, Artificial Sequence
  source: /note="Description of Artificial Sequence: Synthetic oligonucleotide"
gatcctgactccctagtggccccactgtggggggatggggt

SEQ ID NO: 218 - DNA, 41 bp, Artificial Sequence
  source: /note="Description of Artificial Sequence: Synthetic oligonucleotide"
tcccctccaccccacagtggggccactagggagtcaggatc

SEQ ID NO: 219 - DNA, 70 bp, Artificial Sequence
  source: /note="Description of Artificial Sequence: Synthetic oligonucleotide"
ctgtcccctccaccccacagtggggccactagggacaggattggtgacagaaaagccccatccttaggcc

SEQ ID NO: 220 - DNA, 53 bp, Artificial Sequence
  source: /note="Description of Artificial Sequence: Synthetic oligonucleotide"
ttatctgtcccctccaccccacagtggggccactagggacaggtaagggatcc

SEQ ID NO: 221 - DNA, 51 bp, Artificial Sequence
  source: /note="Description of Artificial Sequence: Synthetic oligonucleotide"
ttatctgtcccctccaccccacagtggggccagtggacaggtaagggatcc

SEQ ID NO: 222 - DNA, 52 bp, Artificial Sequence
  source: /note="Description of Artificial Sequence: Synthetic oligonucleotide"
ttatctgtcccctccacccacagtggggccactagggacaggtaagggatcc

SEQ ID NO: 223 - DNA, 46 bp, Artificial Sequence
  source: /note="Description of Artificial Sequence: Synthetic oligonucleotide"
ttatctgtcccctccagtggggccactagggacaggtaagggatcc

SEQ ID NO: 224 - DNA, 43 bp, Artificial Sequence
  source: /note="Description of Artificial Sequence: Synthetic oligonucleotide"
ttcagaccccacagtggggccactagggacaggtaagggatcc

SEQ ID NO: 225 - DNA, 32 bp, Artificial Sequence
  source: /note="Description of Artificial Sequence: Synthetic oligonucleotide"
tgtgggggccactagggacaggtaagggatcc

SEQ ID NO: 226 - DNA, 44 bp, Artificial Sequence
  source: /note="Description of Artificial Sequence: Synthetic oligonucleotide"
ttatctgtcccctccaccccacagtggggccaggtaagggatcc

SEQ ID NO: 227 - DNA, 30 bp, Artificial Sequence
  source: /note="Description of Artificial Sequence: Synthetic oligonucleotide"
gtggggccactagggacaggtaagggatcc

SEQ ID NO: 228 - DNA, 53 bp, Artificial Sequence
  source: /note="Description of Artificial Sequence: Synthetic oligonucleotide"
ttatctgtcccctccaccccacagtggggccaccactagggacaggtaaggga

SEQ ID NO: 229 - DNA, 53 bp, Artificial Sequence
  source: /note="Description of Artificial Sequence: Synthetic oligonucleotide"
ttatctgtcccctccaccccacagtggggccactagggattgctagggacagg

SEQ ID NO: 230 - DNA, 53 bp, Artificial Sequence
  source: /note="Description of Artificial Sequence: Synthetic oligonucleotide"
ttatctgtcccctccaccccacagtggggccagggccactagggacaggcagg

SEQ ID NO: 231 - DNA, 53 bp, Artificial Sequence
  source: /note="Description of Artificial Sequence: Synthetic oligonucleotide"
ttatctgtcccctccaccccacagtggggccacccccacagtggggccactag

SEQ ID NO: 232 - DNA, 53 bp, Artificial Sequence
  source: /note="Description of Artificial Sequence: Synthetic oligonucleotide"
ttatctgtcccctccaccaggattggtgacagaaaagcccccccacagtgggg

SEQ ID NO: 233 - DNA, 52 bp, Artificial Sequence
  source: /note="Description of Artificial Sequence: Synthetic oligonucleotide"
ttatctgtcccctccacacacagtggggccactagggacagaaaagcccccc

SEQ ID NO: 234 - DNA, 53 bp, Artificial Sequence
  source: /note="Description of Artificial Sequence: Synthetic oligonucleotide"
ttatctgtcccctccaccccacagtggggccaggattggtgacagattggtga

SEQ ID NO: 235 - DNA, 53 bp, Artificial Sequence
  source: /note="Description of Artificial Sequence: Synthetic oligonucleotide"
ttatctgtcccctccaccccacaccaaggagtgattgtttcctcagatttccg

SEQ ID NO: 236 - DNA, 85 bp, Artificial Sequence
  source: /note="Description of Artificial Sequence: Synthetic oligonucleotide"
tgtcccctccaccccacagtggggccactagggagtcaggatcctgtccctaggccacccactgtggggtctgacctcttctctt

SEQ ID NO: 237 - DNA, 85 bp, Artificial Sequence
  source: /note="Description of Artificial Sequence: Synthetic oligonucleotide"
tgtcccctccaccccactgtggggccactagggagtcaggatcctgtccctaggccacccactgtggggtctgacctcttctctt

SEQ ID NO: 238 - DNA, 84 bp, Artificial Sequence
  source: /note="Description of Artificial Sequence: Synthetic oligonucleotide"
tgtcccctccacccacagtggggccactagggagtcaggatcctgtccctaggccacccactgtggggtctgacctcttctctt

SEQ ID NO: 239 - DNA, 78 bp, Artificial Sequence
  source: /note="Description of Artificial Sequence: Synthetic oligonucleotide"
tgtcccctccaccccacagtggggccactagggatcctgtccctaggccacccactgtggggtctgacctcttctctt

SEQ ID NO: 240 - DNA, 73 bp, Artificial Sequence
  source: /note="Description of Artificial Sequence: Synthetic oligonucleotide"
tgtcccctccaccccacagtgggtcaggatcctgtccctaggccacccactgtggggtctgacctcttctctt

SEQ ID NO: 241 - DNA, 73 bp, Artificial Sequence
  source: /note="Description of Artificial Sequence: Synthetic oligonucleotide"
tgtcccctccaccccacagggagtcaggatcctgtccctaggccacccactgtggggtctgacctcttctctt

SEQ ID NO: 242 - DNA, 85 bp, Artificial Sequence
  source: /note="Description of Artificial Sequence: Synthetic oligonucleotide"
tgtcccctccaccccacagtggggccactagggacaggagtcaggatcctgtccctaggccacccactgtggggtctgacctctt

SEQ ID NO: 243 - DNA, 85 bp, Artificial Sequence
  source: /note="Description of Artificial Sequence: Synthetic oligonucleotide"
tgtcccctccaccccacagtggggccactaggccactagggagtcaggatcctgtccctaggccacccactgtggggtctgacct

SEQ ID NO: 244 - DNA, 85 bp, Artificial Sequence
  source: /note="Description of Artificial Sequence: Synthetic oligonucleotide"
tgtcccctccaccccacagtggggccactagtggggccactagggagtcaggatcctgtccctaggccacccactgtggggtctg

SEQ ID NO: 245 - DNA, 85 bp, Artificial Sequence
  source: /note="Description of Artificial Sequence: Synthetic oligonucleotide"
tgtcccctccaccccgcagtggggccccacagtggggccactagggagtcaggatcctgtccctaggccacccactgtggggtct

SEQ ID NO: 246 - DNA, 85 bp, Artificial Sequence
  source: /note="Description of Artificial Sequence: Synthetic oligonucleotide"
  modified_base (83)..(83): a, c, t, g, unknown or other
tgtcccctccaccccacagtggggccccacagtggggccactagggagtcaggatcctgtccctaggccacccactgtggggnct

SEQ ID NO: 247 - DNA, 85 bp, Artificial Sequence
  source: /note="Description of Artificial Sequence: Synthetic oligonucleotide"
tgtcccctccaccccacagtggggccactagggagtggggccactagggagtcaggatcctgtccctaggccacccactgtgggg

SEQ ID NO: 248 - DNA, 85 bp, Artificial Sequence
  source: /note="Description of Artificial Sequence: Synthetic oligonucleotide"
tgtcccctccaccccacagtggggcggtccccacagtggggccactagggagtcaggatcctgtccctaggccacccactgtggg

SEQ ID NO: 249 - DNA, 85 bp, Artificial Sequence
  source: /note="Description of Artificial Sequence: Synthetic oligonucleotide"
tgtcccctccaccccacagtggggccactagggacacagtggggccactagggagtcaggatcctgtccctaggccacccactgt

SEQ ID NO: 250 - DNA, 85 bp, Artificial Sequence
  source: /note="Description of Artificial Sequence: Synthetic oligonucleotide"
tgtcccctccaccccacagtggggccactagggacaggattggtgacagaagggagtcaggatcctgtccctaggccacccactg

SEQ ID NO: 251 - DNA, 85 bp, Artificial Sequence
  source: /note="Description of Artificial Sequence: Synthetic oligonucleotide"
tgtcccctccaccccacagtggggccactagggaggtccagtggggccactagggagtcaggatcctgtccctaggccacccact

SEQ ID NO: 252 - DNA, 85 bp, Artificial Sequence
  source: /note="Description of Artificial Sequence: Synthetic oligonucleotide"
tgtcccctccaccccacagtggggccactaggtccccacagtggggccactagggagtcaggatcctgtccctaggccacccact

SEQ ID NO: 253 - DNA, 85 bp, Artificial Sequence
  source: /note="Description of Artificial Sequence: Synthetic oligonucleotide"
tgtcccctccaccccacagtggggccactagggtccccacagtggggccactagggagtcaggatcctgtccctaggccacccac

SEQ ID NO: 254 - DNA, 85 bp, Artificial Sequence
  source: /note="Description of Artificial Sequence: Synthetic oligonucleotide"
tgtcccctccaccccacagtggggccactagggacagggtccccacagtggggccactagggagtcaggatcctgtccctaggcc

SEQ ID NO: 255 - DNA, 85 bp, Artificial Sequence
  source: /note="Description of Artificial Sequence: Synthetic oligonucleotide"
tgtcccctccaccccacagtggggccactagggacaggattggtgacagaaaagcccacagtggggccactagggagtcaggatc

SEQ ID NO: 256 - DNA, 53 bp, Artificial Sequence
  source: /note="Description of Artificial Sequence: Synthetic oligonucleotide"
tgtcccctccaccccacagtggggccactagggaccagagaaaccctaaaaac

SEQ ID NO: 257 - DNA, 29 bp, Artificial Sequence
  source: /note="Description of Artificial Sequence: Synthetic oligonucleotide"
ggtccccacagtggggccactagggagtc

SEQ ID NO: 258 - DNA, 85 bp, Artificial Sequence
  source: /note="Description of Artificial Sequence: Synthetic oligonucleotide"
tgtcccctccaccccacagtggggccaccgggtagggccctgccccttccacgagagtgagaagcgcgtgcttcggtgcttagag

SEQ ID NO: 259 - DNA, 13 bp, Artificial Sequence
  source: /note="Description of Artificial Sequence: Synthetic oligonucleotide"
gcagaagaagagg

SEQ ID NO: 260 - DNA, 26 bp, Artificial Sequence
  source: /note="Description of Artificial Sequence: Synthetic oligonucleotide"
ggtgccccttcctagacacatccctt

SEQ ID NO: 261 - DNA, 26 bp, Artificial Sequence
  source: /note="Description of Artificial Sequence: Synthetic oligonucleotide"
  modified_base (17)..(23): a, c, t, g, unknown or other
ggtgccccttcctagannnnnnntcc

SEQ ID NO: 262 - DNA, 26 bp, Artificial Sequence
  source: /note="Description of Artificial Sequence: Synthetic oligonucleotide"
  modified_base (1)..(1): a, c, t, g, unknown or other
  modified_base (3)..(11): a, c, t, g, unknown or other
nannnnnnnnnttagacacatccctt

SEQ ID NO: 263 - DNA, 126 bp, Artificial Sequence
  source: /note="Description of Artificial Sequence: Synthetic polynucleotide"
  modified_base (1)..(5): a, c, t, g, unknown or other
nnnnngtttcagttattcgttggatagtgtacatatccaacgaatgaagtcacttttaaagtgagctgaaatcactaaaaattaagattgaacccggctactgactctgtcatccgggtttactta

SEQ ID NO: 264 - DNA, 116 bp, Artificial Sequence
  source: /note="Description of Artificial Sequence: Synthetic polynucleotide"
gtttcagttgctgaattatttggtaaacagtaccaaataattaatgctctgtaatcatttaaaagtattttgaacggacctctgtttgacacgtcacaataactaaaaattttttt

SEQ ID NO: 265 - DNA, 97 bp, Artificial Sequence
  source: /note="Description of Artificial Sequence: Synthetic oligonucleotide"
gtttcaaaccgagttgagatacttaactctttagcgtttgaaatcacctaaaggtgttaacagatcggggcaactgccatatggcacccccggtatc

SEQ ID NO: 266 - DNA, 138 bp, Artificial Sequence
  source: /note="Description of Artificial Sequence: Synthetic polynucleotide"
gtttcaaaccgagttgatttgtggtataatttgcaacgatacaaacgcaaattatactacagattaactctttagcgtttgaaatcacctaaaggtgttaacagatcggggcaactgccatatggcacccccggtatc

SEQ ID NO: 267 - DNA, 103 bp, Artificial Sequence
  source: /note="Description of Artificial Sequence: Synthetic polynucleotide"
gtttcaaaccgagttggttcgacgattaactctttagcgtttgaaatcacctaaaggtgttaacagatcggggcaactgcctttggcacccccggtattattc

SEQ ID NO: 268 - DNA, 139 bp, Artificial Sequence
  source: /note="Description of Artificial Sequence: Synthetic polynucleotide"
gtttcaaaccgagttggtttgtggtataatttgcaacgacaaatgcaaattatactacagattaactctttagcgtttgaaatcacctaaaggtgttaacagatcggggcaactgcctttggcacccccggtattattc

SEQ ID NO: 269 - DNA, 99 bp, Artificial Sequence
  source: /note="Description of Artificial Sequence: Synthetic oligonucleotide"
gtttcaaaccaagttggattcaacaatctagcttatagcgtttgaaatcaccacaaggtgtcttcatatcggggcaactgcctttggcacccccggtta

SEQ ID NO: 270 - DNA, 94 bp, Artificial Sequence
  source: /note="Description of Artificial Sequence: Synthetic oligonucleotide"
gtttcaaaccaagttgcaacctagcttatagcgtttgaaatcaccacaaggtgttctcatatcggggcaactgcctttggcacccccggttatt

SEQ ID NO: 271 - DNA, 128 bp, Artificial Sequence
  source: /note="Description of Artificial Sequence: Synthetic polynucleotide"
gtttcaaaccaagttggattgtggtataatttgcaacccaaattataccataatctagcttatagcgtttgaaatcaccacaaggtgttttcatatcggggcaactgcctttggcacccccggttatt

SEQ ID NO: 272 - DNA, 113 bp, Artificial Sequence
  source: /note="Description of Artificial Sequence: Synthetic polynucleotide"
gtttcagtagttgttagaagaagctcttctaacaacgaagtcgccttcgggcgagctgaaatcaatctgattaaatattagatccggctactgaggtctttgaccttatccgg

SEQ ID NO: 273 - DNA, 116 bp, Artificial Sequence
  source: /note="Description of Artificial Sequence: Synthetic polynucleotide"
gtttcagttatatgtagtgactacatatgaagtcgtctctatggcgagctgaaatcaccaaaagttaagatatagaccaagcaactgtaatctacatcttggtatcttcagtatct

SEQ ID NO: 274 - DNA, 86 bp, Artificial Sequence
  source: /note="Description of Artificial Sequence: Synthetic oligonucleotide"
gtttcagtgctatagctcaggatgagctataggaaatcaccttcgggtgagctgaaatcccctaaagctaagattgaatccggcca

SEQ ID NO: 275 - DNA, 114 bp, Artificial Sequence
  source: /note="Description of Artificial Sequence: Synthetic polynucleotide"
gtttcaattgtacaaactactttgtaaaatcgaaataaacccccttgtcccatctatctagccctcttagattctctcgggacagtattatgacaacctatggataggcgacaa

SEQ ID NO: 276 - DNA, 98 bp, Artificial Sequence
  source: /note="Description of Artificial Sequence: Synthetic oligonucleotide"
gtttcagtggttggatcgataccctgaaatcaacaaaattaaagattgaatcgttcctctatgctcgtcttaatagcgagcatataacgatttcaaaa

SEQ ID NO: 277 - DNA, 113 bp, Artificial Sequence
  source: /note="Description of Artificial Sequence: Synthetic polynucleotide"
gtttcagttattcgttgattcaacgaatgaagtcacttctaaagtgagctgaaatcactaaaaattaagattgaacccggctactgactctgtcatccgggtttacttatttc

SEQ ID NO: 278 - DNA, 116 bp, Artificial Sequence
  source: /note="Description of Artificial Sequence: Synthetic polynucleotide"
gtttcacaggctaagcggatcggatccgttcgatgccttgaaatcatcaaaaagatataatagacccgcccactgtattgtacatggcgggactctctaaaacctgtcattgcagt

SEQ ID NO: 279 - DNA, 153 bp, Artificial Sequence
  source: /note="Description of Artificial Sequence: Synthetic polynucleotide"
gttccagttgctaagcgatggtgttgtaaagtgtcgtacacgacactttacaacacgtatcgttcgatgcactggaatcatcgaaaagatatatagacccgcccaactgccttaggcatggcgggcttctttcttaaaacctatcattacaat

SEQ ID NO: 280 - DNA, 119 bp, Artificial Sequence
  source: /note="Description of Artificial Sequence: Synthetic polynucleotide"
gttccagttgctaagcgatggcgtatcgttcgatgcactggaatcatcgaaaagatatatagacccgcccaactgccttaggcatggcgggcttctttcttaaaacctatcattacaat

SEQ ID NO: 281 - DNA, 54 bp, Artificial Sequence
  source: /note="Description of Artificial Sequence: Synthetic oligonucleotide"
aagcctggcagtttcaattaaacactatccaacgaataactgaaacaggagcct

SEQ ID NO: 282 - DNA, 36 bp, Artificial Sequence
  source: /note="Description of Artificial Sequence: Synthetic oligonucleotide"
gtttcagtagttgttagaagaatgtagtattgaagc

SEQ ID NO: 283 - DNA, 28 bp, Artificial Sequence
  source: /note="Description of Artificial Sequence: Synthetic oligonucleotide"
  modified_base (23)..(25): a, c, t, g, unknown or other
tgcataagggatgtgtctaggannntag

SEQ ID NO: 284 - DNA, 46 bp, Artificial Sequence; identical to SEQ ID NO: 204
  source: /note="Description of Artificial Sequence: Synthetic oligonucleotide"

SEQ ID NO: 285 - DNA, 50 bp, Artificial Sequence
  source: /note="Description of Artificial Sequence: Synthetic oligonucleotide"
ccccacagtggggccactagggacaggattggtgacagaaaagccccatc

SEQ ID NO: 286 - DNA, 23 bp, Artificial Sequence
  source: /note="Description of Artificial Sequence: Synthetic oligonucleotide"
ccccacagtggggccactaggga

SEQ ID NO: 287 - DNA, 23 bp, Artificial Sequence
  source: /note="Description of Artificial Sequence: Synthetic oligonucleotide"
gatggggcttttctgtcaccaat

SEQ ID NO: 288 - DNA, 27 bp, Artificial Sequence
  source: /note="Description of Artificial Sequence: Synthetic oligonucleotide"
caggattggtgacagaaaagccccatc

SEQ ID NO: 289 - DNA, 27 bp, Artificial Sequence
  source: /note="Description of Artificial Sequence: Synthetic oligonucleotide"
cctgtccctagtggccccactgtgggg

SEQ ID NO: 290 - DNA, 19 bp, Artificial Sequence
  source: /note="Description of Artificial Sequence: Synthetic oligonucleotide"
gggccactagggacaggat

What is claimed is:

1. A non-naturally occurring CRISPR-Cas system comprising:
a) a Cas9 effector protein capable of generating cohesive ends (stiCas9); and
b) a guide polynucleotide that forms a complex with the stiCas9 and comprises a guide sequence, wherein the guide sequence is capable of hybridizing with a target sequence in a eukaryotic cell but does not hybridize to a sequence in a bacterial cell;
wherein the complex does not occur in nature.

2. A non-naturally occurring CRISPR-Cas system comprising:
a) a Cas9 effector protein capable of generating cohesive ends (stiCas9) and comprises a nuclear localization sequence (NLS); and
b) a guide polynucleotide that forms a complex with the stiCas9 and comprises a guide sequence;
wherein the complex does not occur in nature.

3. A non-naturally occurring CRISPR-Cas system comprising:
a) one or more nucleotide sequences encoding a Cas9 effector protein capable of generating cohesive ends (stiCas9); and
b) a nucleotide sequence encoding a guide polynucleotide that forms a complex with the stiCas9 and comprises a guide sequence, wherein the guide sequence is capable of hybridizing with a target sequence in a eukaryotic cell but does not hybridize to a sequence in a bacterial cell;
wherein the complex does not occur in nature.

4. A non-naturally occurring CRISPR-Cas system comprising:
a) one or more nucleotide sequences encoding a Cas9 effector protein capable of generating cohesive ends (stiCas9); and
b) a nucleotide sequence encoding a guide polynucleotide that forms a complex with the stiCas9 and comprises a guide sequence;
wherein the nucleotide sequences of (a) and (b) are under control of a eukaryotic promoter, and wherein the complex does not occur in nature.

5. The CRISPR-Cas system of any one of claims 1 to 4, wherein the guide polynucleotide comprises a tracrRNA sequence.

6. The CRISPR-Cas system of any one of claims 1 to 4, further comprising a separate polynucleotide comprising a tracrRNA sequence.

7. The CRISPR-Cas system of claim 6, wherein the guide polynucleotide, tracrRNA sequence and the stiCas9 are capable of forming a complex, and wherein the complex does not occur in nature.

8. A non-naturally occurring CRISPR-Cas system comprising one or more vectors comprising:
a) a regulatory element operably linked to one or more nucleotide sequences encoding a Cas9 effector protein capable of generating cohesive ends (stiCas9); and
b) a guide polynucleotide that forms a complex with the stiCas9 and comprises a guide sequence, wherein the guide sequence is capable of hybridizing with a target sequence in a eukaryotic cell but does not hybridize to a sequence in a bacterial cell;
wherein the complex does not occur in nature.

9. A non-naturally occurring CRISPR-Cas system comprising one or more vectors comprising:
a) a regulatory element operably linked to one or more nucleotide sequences encoding a Cas9 effector protein capable of generating cohesive ends (stiCas9), wherein the regulatory element is a eukaryotic regulatory element; and
b) a guide polynucleotide that forms a complex with the stiCas9 and comprising a guide sequence;
wherein the complex does not occur in nature.

10. The non-naturally occurring vector of claim 8 or claim 9, wherein the guide polynucleotide further comprises a tracrRNA sequence.

11. The non-naturally occurring vector of claim 9 or claim 10, further comprising a nucleotide sequence comprising a tracrRNA sequence.

12. The system of any one of claims 1 to 11, wherein the complex is capable of cleaving at a site within 10 nucleotides of a Protospacer Adjacent Motif (PAM).

13. The system of any one of claims 1 to 12, wherein the complex is capable of cleavage at a site within 5 nucleotides of a Protospacer Adjacent Motif (PAM).

14. The system of any of any one of claims 1 to 13, wherein the complex is capable of cleavage at a site within 3 nucleotides of a Protospacer Adjacent Motif (PAM).

15. The system of any one of claims 1 to 14, wherein the target sequence is 5′ of a Protospacer Adjacent Motif (PAM) and the PAM comprises a 3′ G-rich motif

16. The system of any one of claims 1 to 15, wherein the target sequence is 5′ of a Protospacer Adjacent Motif (PAM) and the PAM sequence is NGG, wherein N is A, C, G, or T.

17. The system of any one of claims 1 to 16, wherein the cohesive ends comprise a single-stranded polynucleotide overhang of 3 to 40 nucleotides.

18. The system of any one of claims 1 to 17, wherein the cohesive ends comprise a single-stranded polynucleotide overhang of 4 to 20 nucleotides.

19. The system of any one of claims 1 to 18, wherein the cohesive ends comprise a single-stranded polynucleotide overhang of 5 to 15 nucleotides.

20. The system of any one of claims 1 to 19, wherein the stiCas9 is derived from a bacterial species having a Type II-B CRISPR system.

21. The system of any one of claims 1 to 20, wherein the stiCas9 comprises a domain having at least 95% identity to any one of SEQ ID NOs: 10-97 or 192-195.

22. The system of any of one of claims 1 to 21, wherein the stiCas9 comprises a domain that matches a TIGR03031 protein family with an E-value cut-off of 1E-5.

23. The system of any one of claims 1 to 22, wherein the stiCas9 comprises a domain that matches the TIGR03031 protein family with an E-value cut-off of 1E-10.

24. The system of claim 23, wherein the bacterial species is Legionella pneumophila, Francisella novicida, gamma proteobacterium HTCC5015, Parasutterella excrementihominis, Sutterella wadsworthensis, Sulfurospirillum sp. SCADC, Ruminobacter sp. RM87, Burkholderiales bacterium 1_1-47, Bacteroidetes oral taxon 274 str. F0058, Wolinella succinogenes, Burkholderiales bacterium YL45, Ruminobacter amylophilus, Campylobacter sp. P0111, Campylobacter sp. RM9261, Campylobacter lanienae strain RM8001, Camplylobacter lanienae strain P0121, Turicimonas muris, Legionella londiniensis, Salinivibrio sharmensis, Leptospira sp. isolate FW.030, Moritella sp. isolate NORP46, Endozoicomonassp. S-B4-1U, Tamilnaduibacter salinus, Vibrio natriegens, Arcobacter skirrowii, Francisella philomiragia, Francisella hispaniensis, or Parendozoicomonas haliclonae.

25. The system of claim 24, wherein the target sequence is 5′ of a Protospacer Adjacent Motif (PAM) and the PAM sequence is YG, wherein Y is a pyrimidine and the stiCas9 is derived from the bacterial species F. novicida.

26. The system of any of any one of claims 1 to 25, wherein the stiCas9 comprises one or more nuclear localization signals.

27. The system of any of one of claims 1 to 26, wherein the eukaryotic cell is an animal or human cell.

28. The system of any one of claims 1 to 27, wherein the eukaryotic cell is a human cell.

29. The system of any one of claims 1 to 26, wherein the eukaryotic cell is a plant cell.

30. The system of any one of claims 1 to 29, wherein the guide sequence is linked to a direct repeat sequence.

31. A delivery particle comprising the system according to any one of claims 1 to 30.

32. The delivery particle of claim 31, wherein the stiCas9 and the guide polynucleotide are in a complex.

33. The delivery particle of claim 32, wherein the complex further comprises a polynucleotide comprising a tracrRNA sequence.

34. The delivery particle of claim 32 or 22, further comprising a lipid, a sugar, a metal, or a protein.

35. A vesicle comprising the system according to any one of claims 1 to 30.

36. The vesicle of claim 35, wherein the stiCas9 and the guide polynucleotide are in a complex.

37. The vesicle of claim 36, further comprising a polynucleotide comprising a tracrRNA sequence.

38. The vesicle of any one of claims 35 to 37, wherein the vesicle is an exosome or a liposome.

39. The system of any one of claims 5 to 9, wherein the one or more nucleotide sequences encoding the stiCas9 is codon optimized for expression in a eukaryotic cell.

40. The system of any one of claim 5 to 30 or 39, wherein the nucleotide sequence encoding a Cas9 effector protein and the guide polynucleotide are on a single vector.

41. The system of any one of claim 5 to 30 or 39, wherein the nucleotide sequence encoding a Cas9 effector protein and the guide polynucleotide are a single nucleic acid molecule.

42. A viral vector comprising the system according to any one of claims 5 to 30 or 39 to 41.

43. The viral vector of claim 42, wherein the viral vector is of an adenovirus, a lentivirus, or an adeno-associated virus.

44. A eukaryote cell comprising a CRISPR-Cas system comprising
a) a Cas9 effector protein capable of generating cohesive ends (stiCas9), and
b) a guide polynucleotide that forms a complex with the stiCas9 and comprises a guide sequence, wherein the guide sequence is capable of hybridizing with a target sequence in a eukaryotic cell;
wherein the complex does not occur in nature.

45. A eukaryote cell comprising a CRISPR-Cas system comprising a Cas9 effector protein capable of generating cohesive ends (stiCas9), wherein the Cas9 effector protein is derived from a bacterial species having a Type II-B CRISPR system.

46. A method for providing site-specific modification of a target sequence in a eukaryotic cell, the method comprising:
a) introducing into the cell:
i. a Cas9 effector protein capable of generating cohesive ends (stiCas9); and
ii. a guide polynucleotide that forms a complex with the stiCas9 and comprises a guide sequence, wherein the guide sequence is capable of hybridizing with the target sequence in the eukaryotic cell but does not hybridize to a sequence in a bacterial cell;
wherein the complex does not occur in nature; and
b) generating cohesive ends in the target sequence with the Cas9 effector protein and the guide polynucleotide; and
c) ligating
i. the cohesive ends together, or
ii. a polynucleotide sequence of interest (SoI) to the cohesive ends;
thereby modifying the target sequence.

47. A method for providing site-specific modification of a target sequence in a eukaryotic cell, the method comprising:
a) introducing into the cell:
i. a nucleotide sequence encoding a Cas9 effector protein capable of generating cohesive ends (stiCas9); and
ii. a guide polynucleotide that forms a complex with the stiCas9 and comprising a guide sequence, wherein the guide sequence is capable of hybridizing with the target sequence in the eukaryotic cell but does not hybridize to a sequence in a bacterial cell;
wherein the complex does not occur in nature; and
b) generating cohesive ends in the target sequence with the Cas9 effector protein and the guide polynucleotide; and
c) ligating
i. the cohesive ends together, or
ii. a polynucleotide sequence of interest (SoI) to the cohesive ends;
thereby modifying the target sequence.

48. The method of claim 46 or 47, wherein the guide polynucleotide further comprises a tracrRNA sequence.

49. The method of claim 46 or 47, further comprising introducing into the cell a polynucleotide comprising a tracrRNA sequence.

50. The method of claim 49, wherein the guide polynucleotide, tracrRNA sequence, and the stiCas9 are capable of forming a complex, and wherein the complex does not occur in nature.

51. The method of any one of claims 46 to 50, wherein the complex is capable of cleaving at a site within 10 nucleotides of a Protospacer Adjacent Motif (PAM).

52. The method of any one of claims 46 to 51, wherein the complex is capable of cleaving at a site within 5 nucleotides of a Protospacer Adjacent Motif (PAM).

53. The method of any one of claims 46 to 52, wherein the complex is capable of cleaving at a site within 3 nucleotides of a Protospacer Adjacent Motif (PAM).

54. The method of any one of claims 46 to 53, wherein the target sequence is 5′ of a Protospacer Adjacent Motif (PAM) and the PAM comprises a 3′ G-rich motif

55. The method of any one of claims 46 to 54, wherein the target sequence is 5′ of a PAM and the PAM sequence is NGG, wherein N is A, C, G, or T.

56. The method of any one of claims 46 to 55, wherein the cohesive ends comprise a single-stranded polynucleotide overhang of 3 to 40 nucleotides.

57. The method of any one of claims 46 to 56, wherein the cohesive ends comprise a single-stranded polynucleotide overhang of 4 to 20 nucleotides.

58. The method of any one of claims 46 to 57, wherein the cohesive ends comprise a single-stranded polynucleotide overhang of 5 to 15 nucleotides.

59. The method of any one of claims 46 to 58, wherein the stiCas9 is derived from a bacterial species having a Type II-B CRISPR system.

60. The method of any one of claims 46 to 59, wherein the eukaryotic cell is an animal or human cell.

61. The method of any one of claims 46 to 60, wherein the eukaryotic cell is a human cell.

62. The method of any one of claims 46 to 59, wherein the eukaryotic cell is a plant cell.

63. The method of any one of claims 46 to 62, wherein the modification is deletion of at least part of the target sequence.

64. The method of any one of claims 46 to 62, wherein the modification is mutation of the target sequence.

65. The method of any one of claims 46 to 62, wherein the modification is inserting a sequence of interest into the target sequence.

66. The method of any one of claims 46 to 65, further comprising introducing an exonuclease to remove overhangs generated by the stiCas9.

67. The method of claim 66, wherein the exonuclease is Cas4, Artemis, or TREX2.

68. The method of claim 67, wherein the Cas4 is derived from a bacterial species having a Type II-B CRISPR system.

69. The method of any one of claims 46 to 68, wherein polynucleotides encoding components of the complex are introduced on one or more vectors.

70. A method of introducing a sequence of interest (SoI) into a chromosome in a cell, wherein the chromosome comprises a target sequence (TSC) comprising region 1 and region 2, the method comprising introducing into the cell:
a) a vector comprising a target sequence (TSV), the TSV comprising region 2 and region 1 and the SoI;
b) a first Cas9-endonuclease dimer capable of generating cohesive ends in the TSC, wherein a first monomer of the first Cas9-endonuclease dimer cleaves at region 1 and a second monomer of the first Cas9-endonuclease dimer cleaves at region 2 of the TSC; and
c) a second Cas9-endonuclease dimer capable of generating cohesive ends in the TSV, wherein a first monomer of the second Cas9-endonuclease dimer cleaves at region 2 and a second monomer of the second Cas9-endonuclease dimer cleaves at region 1 of the TSV;
wherein introduction of the vector of (a), the first Cas9-endonuclease dimer of (b) and the second Cas9-endonuclease dimer of (c) into the cell results in insertion of the SoI into the chromosome of the cell.

71. A method of introducing a sequence of interest (SoI) into a chromosome in a cell, wherein the chromosome comprises a target sequence (TSC) comprising region 1 and region 2, the method comprising introducing into the cell:
a) a vector comprising a target sequence (TSV), the TSV comprising region 2 and region 1 and the SoI, wherein the vector comprises cohesive ends;
b) a first Cas9-endonuclease dimer capable of generating cohesive ends in the TSC, wherein a first monomer of the Cas9-endonuclease dimer cleaves at region 1 and a second monomer of the Cas9-endonuclease dimer cleaves at region 2 of the TSC;
wherein introduction of the vector of (a) and the first Cas9-endonuclease dimer of (b) into the cell results in insertion of the SoI into the chromosome of the cell.

72. The method of claim 70 or claim 71, wherein the first and second Cas9-endonuclease dimers are the same.

73. The method of claim 70 or claim 71, wherein the first and second Cas9-endonuclease dimers are different.

74. The method of any one of claims 70 to 73, further comprising introducing into the cell a first guide polynucleotide that forms a complex with the first monomer of the first Cas9-endonuclease dimer and comprises a first guide sequence, wherein the first guide sequence hybridizes to the TSC comprising region 1 but does not hybridize to the vector.

75. The method of any one of claims 70 to 73, further comprising introducing into the cell a first guide polynucleotide that forms a complex with the first monomer of the first Cas9-endonuclease dimer and comprises a first guide sequence, wherein the first guide sequence hybridizes to the TSC and the TSV.

76. The method of any one of claims 70 to 75, further comprising introducing into the cell a second guide polynucleotide that forms a complex with the second monomer of the first Cas9-endonuclease dimer and comprises a second guide sequence, wherein the second guide sequence hybridizes to the TSC comprising region 2 but does not hybridize to the vector.

77. The method of any one of claims 70 to 75, further comprising introducing into the cell a second guide polynucleotide that forms a complex with the second monomer of the first Cas9-endonuclease dimer and comprises a second guide sequence, wherein the second guide sequence hybridizes to the TSC and the TSV.

78. The method of any one of claims 70 to 77, further comprising introducing into the cell a third guide polynucleotide that forms a complex with the first monomer of the second Cas9-endonuclease dimer and comprises a third guide sequence, wherein the third guide sequence hybridizes to the TSV comprising region 2 but does not hybridize to the chromosome.

79. The method of claims 70 to 78, further comprising introducing into the cell a third guide polynucleotide that forms a complex with the first monomer of the second Cas9-endonuclease dimer and comprises a third guide sequence, wherein the third guide sequence hybridizes to the TSC and the TSV.

80. The method of any one of claims 70 to 79, further comprising introducing into the cell a fourth guide polynucleotide that forms a complex with the second monomer of the second Cas9-endonuclease dimer and comprises a fourth guide sequence, wherein the fourth guide sequence hybridizes to the TSV comprising region 1 but does not hybridize to the chromosome.

81. The method of any one of claims 70 to 80, further comprising introducing into the cell a fourth guide polynucleotide that forms a complex with the second monomer of the second Cas9-endonuclease dimer and comprises a fourth guide sequence, wherein the fourth guide sequence hybridizes to the TSC and the TSV.

82. The method of any one of claims 70 to 81, comprising introducing into the cell the first, second, third, and fourth guide polynucleotides.

83. The method of any one of claims 70 to 82, further comprising introducing into the cell a polynucleotide comprising a tracrRNA sequence.

84. The method of any one of claims 70 to 83, wherein the endonucleases in the first monomer and the second monomer of the first Cas9-endonuclease dimer are Type IIS endonucleases.

85. The method of any one of claims 70 to 83, wherein the endonucleases in the first monomer and the second monomer of the second Cas9-endonuclease dimer are Type IIS endonucleases.

86. The method of any one of claims 70 to 85, wherein the endonucleases in the first Cas9-endonuclease dimer and the second Cas9-endonuclease dimer are Type IIS endonucleases.

87. The method of any one of claims 70 to 86, wherein the endonucleases in the first Cas9-endonuclease dimer and the second Cas9-endonuclease dimer, are independently selected from the group consisting of BbvI, BgcI, BfuAI, BmpI, BspMI, CspCI, FokI, MboII, MmeI, NmeAIII, and PleI.

88. The method of any one of claims 70 to 87, wherein the endonucleases in the first Cas9-endonuclease dimer and the second Cas9-endonuclease dimer are FokI.

89. The method of any one of claims 70 to 88, wherein the first and second Cas9-endonuclease dimers are introduced into the cell as polynucleotides encoding the first and second Cas9-endonuclease dimers.

90. The method of claim 89, wherein the polynucleotide encoding the first and second Cas9-endonuclease dimers are on one vector.

91. The method of claim 89, wherein the polynucleotide encoding the first and second Cas9-endonuclease dimers are on more than one vector.

92. The method of any one of claims 70 to 91, wherein the first, second or both Cas9-endonuclease dimers comprise a modified Cas9.

93. The method of claim 92, wherein the first, second or both Cas9-endonuclease dimers comprise a catalytically inactive Cas9.

94. The method of claim 93, wherein the endonuclease in the first, second or both Cas9-endonuclease dimers is FokI.

95. The method of claim 92, wherein the first, second or both Cas9-endonuclease dimers comprise a Cas9 having nickase activity.

96. The method of claim 95, wherein the endonuclease in the first, second or both Cas9-endonuclease dimers is FokI.

97. The method of claim 92, wherein the Cas9-endonuclease dimer comprises a single amino-acid substitution in Cas9 relative to a wild-type Cas9.

98. The method of claim 97, wherein the endonuclease in the first, second or both Cas9-endonuclease dimers are FokI.

99. The method of claim 97 or 98, wherein the single amino-acid substitution is D10A or H840A.

100. The method of claim 97 or 98, wherein the single amino-acid substitution is D10A.

101. The method of claim 97 or 98, wherein the single amino-acid substitution is H840A.

102. The method of claim 92, wherein the Cas9-endonuclease dimer comprises a double amino-acid substitution relative to a wild-type Cas9.

103. The method of claim 102, wherein the double amino-acid substitution is D10A and H840A.

104. The method of claim 97, wherein the wild-type Cas9 is derived from Streptococcus pyogenes, Staphylococcus aureus, Staphylococcus pseudintermedius, Planococcus antarcticus, Streptococcus sanguinis, Streptococcus thermophilus, Streptococcus mutans, Coribacterium glomerans, Lactobacillus farciminis, Catenibacterium mitsuokai, Lactobacillus rhamnosus, Bifidobacterium bifidum, Oenococcus kitahara, Fructobacillus fructosus, Finegoldia magna, Veillonella atyipca, Solobacterium moorei, Acidaminococcus sp. D21, Eubacterium yurri, Coprococcus catus, Fusobacterium nucleatum, Filifactor alocis, Peptoniphilus duerdenii, or Treponema denticola.

105. The method of any one of claims 70 to 104, wherein the cohesive ends comprise a 5′ overhang.

106. The method of any one of claims 70 to 104, wherein the cohesive ends comprise a 3′ overhang.

107. The method of any one of claims 70 to 106, wherein the first, second or both Cas9-endonuclease dimers generate cohesive ends comprising a single-stranded polynucleotide of 3 to 40 nucleotides.

108. The method of any one of claims 70 to 106, wherein the first, second or both Cas9-endonuclease dimers generate cohesive ends comprising a single-stranded polynucleotide of 4 to 30 nucleotides.

109. The method of any one of claims 70 to 106, wherein the first, second or both Cas9-endonuclease dimers generate cohesive ends comprising a single-stranded polynucleotide of 5 to 20 nucleotides.

110. The method of any one of claims 70 to 109, wherein upon the insertion, the target sequence in the chromosome and the target sequence in the plasmid are not reconstituted.

111. The method of any one of claims 70 to 110, wherein the cell is a eukaryotic cell.

112. The method of any one of claims 70 to 111, wherein the cell is an animal or human cell.

113. The method of any one of claims 70 to 112, wherein the cell is a plant cell.

114. The method of any one of claims 70 to 113, wherein the vector of (a), the first Cas9-endonuclease dimer of (b), the second Cas9-endonuclease dimer of (c) or combinations thereof are introduced into the cell via delivery particles, vesicles, or viral vectors.

115. The method of any one of claims 70 to 114, wherein the vector of (a), the first Cas9-endonuclease dimer of (b), the second Cas9-endonuclease dimer of (c) or combinations thereof are introduced into the cell via delivery particles.

116. The method of claim 115, wherein the delivery particles comprise a lipid, a sugar, a metal, or a protein.

117. The method of any one of claims 70 to 114, wherein the vector of (a), the first Cas9-endonuclease dimer of (b), the second Cas9-endonuclease dimer of (c) or combinations thereof are introduced into the cell via vesicles.

118. The method of claim 117, wherein the vesicles are exosomes or liposomes.

119. The method of any one of claims 70 to 113, wherein polynucleotides capable or expressing (b), (c) or combinations thereof are introduced into the cell via a viral vector.

120. The method of any one of claims 70 to 113, wherein the vector of (a) is a viral vector.

121. The method of claim 119 or 120, wherein the viral vector is an adenovirus, lentivirus, or adeno-associated virus.

122. The method of any one of claims 70 to 121, wherein the first monomer of the first Cas9-endonuclease dimer forms a complex with the first guide polynucleotide, and the second monomer of the first Cas9-endonuclease dimer forms a complex with the second guide polynucleotide.

123. The method of any one of claims 70 to 122, wherein the first monomer of the second Cas9-endonuclease dimer forms a complex with the third guide polynucleotide, and the second monomer of the second Cas9-endonuclease dimer forms a complex with the fourth guide polynucleotide.

124. The method of any one of claims 70 to 121, wherein the first monomer of the first Cas9-endonuclease dimer forms a complex with the first guide polynucleotide sequence and a tracrRNA sequence, and the second monomer of the first Cas9-endonuclease dimer forms a complex with the second guide polynucleotide sequence and a tracrRNA sequence.

125. The method of any one of claims 70 to 122, wherein the first monomer of the second Cas9-endonuclease dimer forms a complex with the third guide polynucleotide sequence and a tracrRNA sequence, and the second monomer of the second Cas9-endonuclease dimer forms a complex with the fourth guide polynucleotide sequence and a tracrRNA sequence.

126. The method of any one of claims 70 to 125, wherein the first, second or both Cas9-endonuclease dimers comprise a nuclear localization signal.

127. The method of any one of claims 70 to 126, wherein the cell comprises a stem cell or stem cell line.

128. A method of modifying one or more nucleotides in a target polynucleotide sequence in a cell, the method comprising:
a) introducing into the cell a vector comprising an insertion cassette (IC), the IC comprising, in a 5′ to 3′ direction,
i. a first region homologous to part of the target polynucleotide sequence,
ii. a second region comprising a mutation of one or more nucleotides in the target polynucleotide sequence,
iii. a first nuclease binding site,
iv. a polynucleotide sequence encoding a marker gene,
v. a second nuclease binding site,
vi. a third region comprising a mutation of one or more nucleotides in the target polynucleotide sequence, and
vii. a fourth region homologous to part of the target polynucleotide sequence, wherein the first region and the fourth region are 95%-100% identical to their respective parts of the target polynucleotide sequence;
b) inserting the IC into the target polynucleotide sequence via homologous recombination to generate a first modified target polynucleotide;
c) selecting a cell which expresses the marker gene;
d) subjecting the first modified target polynucleotide to a site-specific nuclease to generate a second modified target polynucleotide having cohesive ends; and
e) subjecting the second modified target polynucleotide having cohesive ends to a ligase, wherein the ligase ligates the cohesive ends at the second region and the third region to create a ligated modified target nucleic acid comprising one or more modified nucleotides when compared to the target polynucleotide sequence.

129. The method of claim 128, wherein the first modified target nucleic acid is isolated from the cell after (c).

130. The method of claim 128 or 129, wherein the site-specific nuclease is exogenous to the cell.

131. The method of any one of claims 128 to 130, wherein the ligase is exogenous to the cell.

132. The method of claim 128, wherein the first modified target protein is in the cell after (c).

133. The method of claim 132, wherein the site-specific nuclease is introduced into the cell as a polynucleotide encoding the site-specific nuclease.

134. The method of claim 132 or 133, wherein the ligase is introduced into the cell as a polynucleotide encoding a ligase.

135. The method of any one of claims 128 to 134, wherein the site-specific nuclease is a recombinant site-specific nuclease.

136. The method of any one of claims 128 to 135, wherein the ligase is a recombinant ligase.

137. The method of any one of claims 128 to 136, wherein the site-specific nuclease is a Cas9 effector protein.

138. The method of claim 137, wherein the Cas9 effector protein is a Type II-B Cas9.

139. The method of any one of claims 128 to 131, wherein the site-specific nuclease is a Cas9-endonuclease fusion protein.

140. The method of claim 139, wherein the endonuclease in the Cas9-endonuclease fusion protein is a Type IIS endonuclease.

141. The method of claim 139, wherein the endonuclease in the Cas9-endonuclease fusion protein is FokI.

142. The method of any one of claims 139 to 141, wherein the Cas9-endonuclease fusion protein comprises a modified Cas9.

143. The method of claim 142, wherein the modified Cas9 comprises a catalytically inactive Cas9.

144. The method of claim 143, wherein the endonuclease is FokI.

145. The method of claim 142, wherein the Cas9-endonuclease fusion protein comprises a Cas9 having nickase activity, and the endonuclease is FokI.

146. The method of claim 143, wherein the Cas9-endonuclease fusion protein comprises a Cas9 having a D10A substitution.

147. The method of claim 143, wherein the Cas9-endonuclease fusion protein comprises a Cas9 having a H840A substitution.

148. The method of claim 128, wherein the site-specific nuclease is Cas9, Cpf1, or Cas9-FokI.

149. The method of claim 128, wherein the site-specific nuclease is a Cpf1 effector protein.

150. The method of any one of claims 128 to 149, wherein the cohesive ends of the second modified target polynucleotide of (d) comprise a 5′ overhang.

151. The method of any one of claims 128 to 149, wherein the cohesive ends of the second modified target polynucleotide of (d) comprise a 3′ overhang.

152. The method of any one of claims 128 to 151, wherein the site-specific nuclease is capable of generating cohesive ends comprising a single-stranded polynucleotide of 3 to 40 nucleotides.

153. The method of any one of claims 128 to 151, wherein the nuclease is capable of generating cohesive ends comprising a single-stranded polynucleotide of 4 to 30 nucleotides.

154. The method of any one of claims 128 to 151, wherein the nuclease is capable of generating cohesive ends comprising a single-stranded polynucleotide of 5 to 20 nucleotides.

155. The method of any one of claims 128 to 154, wherein the target polynucleotide sequence is in a plasmid.

156. The method of any one of claims 128 to 155, wherein the target polynucleotide sequence is in a chromosome.

157. An engineered guide RNA that forms a complex with a stiCas9 protein, comprising:
a) a guide sequence capable of hybridizing to a target sequence in a eukaryotic cell; and
b) a tracrRNA sequence capable of binding to the Cas9 protein, wherein the tracrRNA differs from a naturally-occurring tracrRNA sequence by at least 10 nucleotides,
wherein the engineered guide RNA improves nuclease efficiency of the Cas9 protein.

158. The engineered guide RNA of claim 157, wherein the tracrRNA sequence has at least 10 fewer nucleotides than a naturally-occurring tracrRNA.

159. The engineered guide RNA of claim 157, wherein the tracrRNA sequence has at least 10 more nucleotides than a naturally-occurring tracrRNA.

160. The engineered guide RNA of claim 157, wherein the guide sequence comprises at least 90% sequence identity to any one of SEQ ID NOs: 104-125 or 196-199.

161. The engineered guide RNA of claim 157, wherein the tracrRNA sequence comprises at least 90% sequence identity to any one of SEQ ID NOs: 148-171.

162. The engineered guide RNA of claim 157, wherein the guide RNA comprises at least 90% sequence identity to any one of SEQ ID NOs: 172-191.

163. The engineered guide RNA of any one of claims 157 to 159, wherein the tracrRNA comprises one or more modifications in a stem loop of the tracrRNA.

164. The engineered guide RNA of claim 163, wherein the modification comprises elongation of the stem loop.

165. The engineered guide RNA of claim 163, wherein the modification comprises shortening of the stem loop.

166. The engineered guide RNA of claim 163, wherein the modification comprises one or more nucleotide substitutions in the stem loop.

167. The engineered guide RNA of any one of claims 157 to 166, wherein the improved nuclease efficiency of the Cas9 protein is determined by a biochemical assay, a sequencing assay, and/or an affinity test.

168. A CRISPR-Cas system comprising an engineered guide RNA of any one of claims 157 to 163.

169. An engineered Cas9-guide RNA complex, comprising any combination of Cas9, guide sequence, and tracrRNA sequence as found in FIG. 40B.

170. The CRISPR-Cas system of claim 163, wherein the system does not comprise a tracrRNA sequence on a separate polynucleotide.

171. A method of producing an engineered guide RNA that binds to a Cas9 protein, comprising:
a. providing a guide sequence capable of hybridizing to a target sequence in a eukaryotic cell;
b. modifying a naturally-occurring tracrRNA sequence by removing at least ten nucleotides from the tracrRNA sequence to form a modified tracrRNA sequence; and
c. linking the guide sequence to the modified tracrRNA sequence to generate the engineered guide RNA.

172. A non-naturally occurring CRISPR-Cas system comprising:
a) a Cas9 effector protein capable of generating cohesive ends (stiCas9); and
b) a guide RNA that forms a complex with the stiCas9 and comprises a guide sequence, wherein the guide sequence is capable of hybridizing with a target sequence in a eukaryotic cell but does not hybridize to a sequence in a bacterial cell;
wherein the complex does not occur in nature, and
wherein the system does not comprise a tracrRNA sequence on a separate polynucleotide.
